United States Patent Application Publication US 2005/0085436 A1 - sequence listing, part 2

SEQ ID NO: 1085 - DNA, 5566 bp, human
atttttggctgcctctgtcggtctgttcagttaccacgtgaaccgccgacggagacccgtagtgggggaggcggcggcagcgttaagtgagaaaggaaaaaagacaacgaggaaaaaggaggtgtccgggtagggcaacgcggcgacacccgaggcctggtggtggcggcggatcgagatattcaaggctgaagcagctacggaacggcagcggcggcggtcggacaaactgactgaccgagccgggtggtggcgggagcagcgggagcagccggaacgatgccggccgtgagcctcccgcccaaggagaatgcgctcttcaagcggatcttgaggtgttatgaacataaacagtatagaaatggattgaaattctgtaaacaaatactttctaatcccaaatttgcagagcatggagaaaccttggctatgaaaggattaacattgaactgtttggggaaaaaggaagaagcttatgaattggttcgtagaggtttgagaaatgacttgaagagtcatgtgtgttggcacgtttatggccttcttcagaggtcagacaagaagtatgatgaagccattaagtgttacagaaatgcactaaaatgggataaagacaatcttcaaatcttaagggacctttccttactacagattcaaatgcgagatcttgagggttacagggaaacgaggtatcagttacttcagcttcgacctgcgcagagagcatcatggattggttatgctattgcttaccatttattagaagattatgaaatggcagcaaagattttagaagaatttaggaaaacacaacagacatcccctgacaaggtggattatgaatatagtgaactactcttatatcagaatcaagttcttcgggaagcaggtctctatagagaagctttggaacatctttgtacctatgaaaagcagatttgtgataaacttgctgtagaagaaaccaaaggggaacttctgttgcaactatgtcgtttggaagatgctgcagatgtttatagaggattgcaagagagaaatcctgaaaactgggcctattacaaaggcttggaaaaagcactcaagccagctaatatgttagaacggctaaaaatttatgaggaagcctggactaaatatcccaggggactggtgccaagaaggctgccgttaaactttttatctggtgagaagtttaaagaatgtttggataagttcctaaggatgaatttcagcaagggttgcccaccagtcttcaatactttaagatcattatacaaagacaaagaaaaggtggcaatcatagaagagttagtagtaggttatgaaacctctctaaaaagctgccggttatttaaccccaatgatgatggaaaggaggaaccaccaaccacattactttgggtccagtactacttggcacaacattatgacaaaattggtcagccatctattgctttggagtacataaatactgctattgaaagtacacctacattaatagaactctttctcgtgaaagctaaaatctataagcatgctggaaatattaaagaagctgcaaggtggatggatgaggcccaggccttggacacagcagacagatttatcaactccaaatgtgcaaaatacatgctaaaagccaacctgattaaagaagctgaagaaatgtgctcaaagtttacaagggaaggaacatcagcggtagagaatttgaatgaaatgcagtgcatgtggttccaaacagaatgtgcccaggcttataaagcaatgaataaatttggtgaagcacttaagaaatgtcatgagattgagagaaaatcactgatgaccagtttgactttcatacatactgtatgaggaagattacccttagatcatatgtggacttattaaaactagaagatgtacttcgacagcatccattttacttcaaggcagcaagaattgctatagagatctatttgaagcttcatgacaacccccttacagatgagaataaagaacacgaagctgatacagcaaacatgtctgacaaagagctaaagaagctacgtaataaacaaagaagagctcaaaagaaagcccagatagaagaagagaaaaaaaatgcagaaaaagaaaagcagcagagaaatcagaaaaagaagaaggatgatgatgatgaggagataggaggtccaaaagaagaacttattccagagaaactggccaaggttgaaactccattggaagaagctattaaatttttaacaccgttgaagaacttggtgaagaacaagatagagactcatctttttgcctttgagatttactttaggaaagaaaagtttcttttgatgctacaatcagtaaagagggcatttgctattgattctagtcatccctggcttcatgagtgtatgattcgtctctttaatactgcagtgtgtgaaagtaaagatttatctgatacagttagaacagtattaaaacaagaaatgaatcgtctttttggagcaacgaatccaaagaattttaatgaaacttttctgaaaaggaattctgattcattgccacacagattatcagctgccaaaatggtatattacttagatccttctagtcagaagcgagctatagagttggcaacaacacttgatgaatctctcactaacagaaacctccagacatgtatggaggtattggaagccttgtatgatggtagcctaggagactgtaaagaagctgctgaaatttatagagcaaattgtcataagcttttcccttatgctttggctttcatgcctcctggatatgaagaggatatgaagatcacagttaatggagatagttctgcagaagctgaagaactggccaatgaaatttgaacatcactaaacaagcaaatggaatgactttggaccatatctagtatataatatttttgtcacgcacctgctgcattgctctaacttacacagaatgagaggagtaaatgttcttgccttcaaatagtgttttacgttttttatcctgctgaaaaagtatatataaaatatctaacattacaggatagaggttcagtttcttaaaaaattaaagctgctaaaattgagtggttaaaaaagataccttatcctattcctccccacccacccatgtttttaaactaatttatataaaatctggaggctgttacagctaacaaagcaggtgtgtggcagaaatattactttaaatttgtcttgtgagattttactatatctcagacagcataaatgctgttttagcactggattctttcactgagcacaaagagttgttggggctttagcatctgactgattttgttacggggttgattctgaccataggaagtatgcaatgtgaatcactatttacagagaaacctacaacagatgcttgatgttgtagaaactgggacatatagataccaagcaaaattataagaaacctataaggtgttcaatacgcttgtgtttccaaaattcactgtacatgatcagtttggtgttcttgtaccacagtttttaactgaaggaaccagttgtaacagtctcaattttaactaaaacttgaagaactaaaacaacaatgcaaacctttcagcattgtttggccaaacttgttaaaactgtaatgcaagaaccaaatgcactgtgatgtggcaccaactaattagcaagcatgaatttttcacccaagagtgaaaaaaggaaaatctaccatggcttgaagttaaagagcagaactcctgactaccattctatgactgatcaaaagactaatagttaaaaacctcagcaggccttgttcacgatatgcagaaaaaaaagtgctgcagtttagatacctctggaatttttccacagtgtcacaggtttgtaatacttgaagccctacatttctaagaatatatttcttgctcagttgtttcaggcaagcccaagactttgtaatttttaaagggcccaagatttttttttttttttttttttcaaataacagaccagcttctttttcttgcagttacagatgtaatttcctttttgttgtcaaacataaggtaccaaatatgatgcaataaattgttttgaaaaacagttgtgtgaatatttcaactaatctgtgttgggcttctgtgaaatacacaggtggaaacagaggtgcaagccagaggcaatgtaatatgctgtaaggctagtgcagatgggagctttttagaaggggctaagtgctggtgtcagggaaattccataatgaagtagaatgctgctcctgcattaagatttcattgagggcaaggctggtggcaggtactatgaatgtaattcataatttaaaaggaaaactaaaaactattttgatttgggaaaatgagccttaatttgttaaacctatacactgagaactagcctcaggcttaatattctcattgcatttgcaagatctgagcaaataagattaagtaaaacaaatcaattgtatatataattgacctttttgtggaacatgtagtttatagaaagtatactctaaagggaatttgccgaagaccttttactgattgaacagttgtgctacaatcaacttttcatagtacatgacctgcattccacatctcagtctaacagtttagtagtgatgtaaagagaagtacaaaccgaactccagtgctttgttatgttttattaactggccctgtctcaggaacatcttaacagatggcaaaaaaacaaaaactttttttcaactcctatgagtggcaactgaagttcttattgttgggaaagaacactagtcctacctctgccactaatgaggtgtttggaggaggtaccagccatataatagggggtgtatgtgtgaattttgtttaaactctactgtatattgaaatgaaattcatttatttgtcttgacaatgttcaaatgatgtagattgtcttagaatgaatattcataagtactcagaactcttaagatgcagatgccacccgtgaggagctaaattcctaatgtgtattgtattccaacccaattttactggaactattgaataaatcttttattttctttcaggtttacttgatagtggatacattggtgtcagaggaccttgactgggttcattttatgtccagacatcacccctgaaacactgtactgtactatcttgctctgagtagtatcaactggatcgtctcatatttgcctcattcatcctattaatttcaaatgatactgtgggggaaaaacagggttagaaaaacaagtggaaaaaatggagtgatgttgtaatctaaacaagtgccttatgtttattgctaagaactggtgttaccaacccttttgagaagaaagggtctcttgacctgtattaacataggaaagtaaagttctttttgtttttctttataagctactcttgtcatttctcgttgaaaaactaaaatctgactaggttagtttactcagctttaattagatagttgagtcatatattttcaacatttttctgtatcgtatttattatgcacaaaaataaagtgtgatctctaat

SEQ ID NO: 1086 - DNA, 4964 bp, human
ctgcgagtccgcgagccagcgagctgcggctgcggcctcccctgcgcgcagctacccgggcgtcccggcccgcggccccgctaaccccggggcccgcgcccccgcggcagggatgcatcatggccacgctggcttgccgggtgcagttcttggacgacacggaccctttcaacagcaccaacttccccgagcccagccggccgccgctgttcacgttccgcgaggacctcgcgctcggcacccagctggcgggggtccataggctgctgcaggcgccgcacaagctggatgactgtactctgcagctctctcacaatggcgcctacctggatttggaggccaccctggcagagcagcgggatgagttggaaggcttccaggatgacgccgggcggggcaagaagcacagcatcatcctaaggacgcagctgtctgtgagggtccatgcctgcatcgaaaaactatacaactccagcggacgagatttgagaagggccctcttctccctgaagcagatatttcaggatgacaaggatttggtgcatgaatttgtagtggctgaaggtctgacatgtttgatcaaggtgggagctgaggctgatcagaactatcagaactacatcttaagggctttgggccagattatgttgtatgtggatggaatgaatggagtaataaaccgcaatgaaaccattcagtggctgtacactctcattgggtcaaagttccgcctggtggtgaagacagccctgaagctgctgctcgtctttgtagagtactcggagtccaacgcacctctcctaattcaggctgtcactgctgttgacacgaaaagaggggtcaaaccttggtcaaatatcatggaaatcctggaggaaaaagatggagttgatacggagctactggtttatgcaatgactttggtgaacaagacgttatcaggactaccagaccaagacaccttctacgacgtcgtggactgcctggaggagctgggcattgctgctgtgtcccagaggcacttgaacaagaaagggactgacctggacttagtggagcaactcaacatttatgaggtggcgctcaggcacgaggatggcgatgagaccacggagccaccccccagtgggtgccgggaccggaggagggccagcgtgtgttccagtggcggaggcgagcaccggggcctggaccgcagaaggagccgcaggcactcggtgcagagcatcaagagcaccctgtcggcccccaccagtccctgctcccagtcagctcccagcttcaagcccaaccaagtgcgagatctgcgtgaaaaatacagcaattttggcaataactcttatcactcctcaagaccctcatctggatccagtgtgcccaccacccccacatcatccgtctcacccccacaggaggccaggttggaaaggtcatcaccgagtggtcttctcacatcatccttcaggcagcaccaagagtcactggcagcagagagagagaggcggcggcaggagagagaagaaaggttgcagagaatagagcgggaagaaagaaacaaattcagccgagattatttagacaaaagagaggagcaaaggcaagcaagagaagaaagatacaaatacttggaacagttggcagctgaggagcacgagaaggagctgagaagccggagtgtgagccggggcagagccgacctctccttggacctgacctcgccagcagccccagcctgcctggctcctctgagccatagcccctcatcttcagactctcaagaggctctcacggtgtctgcctcctccccaggaacccctcaccatccccaagcaagtgccggggatcctgaacccgaatcagaggcagaaccggaagcagaggcaggggcggggcaggttgctgatgaagctggccaggacatagcctctgcccacgagggtgcagagactgaagtggagcaggcactagagcaagagccggaagaaagagcctccctcagtgaaaaagagaggcagaacgagggggtgaacgagagggacaactgctctgcctccagcgtctcgtcctccagcagcacgttggagagggaggagaaggaggacaagctctccagggacaggacaactggtttgtggcccgcaggtgtccaggatgcaggtgtaaatggacagtgtggcgacatcctcaccaacaaacggttcatgcttgacatgctgtatgcccataacaggaagtctccggatgatgaggagaagggggatggggaggctgggaggacccagcaggaggcagaggcggtagccagccttgctaccaggatatccaccctgcaggccaactctcagacccaggatgagagtgtcaggagggtggatgtcggctgtttggacaatcggggcagtgtgaaagcatttgctgagaaattcaacagtggggacctggggagaggttccatctcccctgatgctgagcccaatgacaaggtcccagaaacagcgccggtgcagccgaagacagagtctgattacatctgggaccagctcatggccaatccaagagagctcagaatccaagacatggatttcactgacctgggggaggaggatgacattgatgtcctagatgtggacctgggtcacagggaggcccctgggccacctcccccacccccacccacctttctgggtttgccgcccccaccccctccgcccctgttggacagcattcctccccctcctgtccctggtaatttattggttcctcctcctccagtgttcaacgctcctcagggcttagggtggtcccaggtacccaggggtcagcccacattcactaagaaaaagaagaccatccgtttgttctggaatgaagttcggccttttgactggccatgtaaaaacaaccgacgctgcagagaattcctgtggtcaaaactggaacccattaaggtggacacttccagactggagcacctgtttgagtctaaatccaaggaactgtctgtctcaaagaaaactgctgcagatggaaaaaggcaagagatcattgttctggattccaagaggagtaacgccatcaatattggtctgacggtgctgccccctccaaggacgattaagatcgccattttgaattttgatgagtatgccttaaacaaagaaggaatcgagaaaattctaacgatgattcccaccgatgaggagaagcagaaaatccaggaagctcagctggccaaccctgaaatccccctgggcagtgcagagcagttcctcctcaccctgtcctccatcagcgagctctctgcacgacttcacctctgggcattcaaaatggattatgaaactacagaaaaggaagtagcagaaccactcctggacctgaaggaaggaatagaccagttggagaacaataaaaccttgggctttatcctgtctactctcttagccattgggaactttctaaatggaactaatgccaaagcgtttgagttaagctacctcgagaaggttccagaagtcaaagacacagtgcacaagcagtcgcttctccaccatgtgtgcaccatggtggtagaaaacttcccagacagctccgatctgtactcggagatcggggccatcaccaggtcagccaaggttgactttgatcaacttcaggataatttatgtcagatggagagaagatgcaaagcttcatgggatcacctcaaggcaattgcaaaacatgaaatgaaaccagttttaaaacaacggatgtcagagttcctgaaagactgtgcagagcgaattataattttaaagattgtccatagaaggataatcaacagattccactcctttttactctttatgggccatccaccttatgcaattcgggaagtgaacataaacaaattctgcaggattattagtgaatttgcactagagtatcgcacaaccagggaaagggttttgcagcagaaacagaaacgggccaaccacagagagagaaataagaccagagggaagatgatcaccgattctggcaagttctccggcagttctccggcgcccccaagccagccgcagggtctgagctatgcggaggacgcggctgagcacgagaacatgaaggctgtgctgaaaacctcgtccccctccgtggaggacgccacccccgcgctgggcgtccgcacacgcagccgagcaagccgaggatccactagttcctggactatgggaactgatgactcgcccaatgtcacagatgatgcagctgatgagatcatggaccgcatcgtcaagtcagccacccaagtgcccagtcagcgagtggtgccgagggagaggaaacgatcccgggccaaccggaaatctttgcgaagaaccctgaagagcggcctgaccccagaagaagccagagccctgggcttggttggcacctcggagttgcagctgtgacactcataggttactcccaggagtgtgctgagcagaaggcaagctcttgctggatgaaacccctccaggtggggttggggagacttgatattcacatccaacagtttgaaaagggagagctcaattcccagcgtcaccccatggcttgtgttgcctgctacgcattgacttggatctccaggagtcccctgcacataccttctccatcgtgtcagctgtgtttctcttgattccgtgacacccggtttattagttcaaaagtgtgacaccttttctgggcaaggaacagcccctttaaggagcaaatcacttctgtcacagttattatggtaatatgaggcaatctgattagcttcacagactgagtctccacaacaccaaaatatccagatgtaaaccccaaacttgtacacaaaagaaagcacagattgtttacctgttgtggattttagatgtaacaaatgtttatacaaatacatacatgtacaccatgtttcaaatactaaataaatagagtttaatgcc

SEQ ID NO: 1087 - DNA, 1584 bp, human
gttgaggcgccccgcccagtcagcaaggttgcgcgtgccctgtgagaccgccaagatggtggtgggcgcgttccctatggcgaagctgctatacttgggcatccggcaggtcagcaagccgcttgccaaccgtattaaggaggccgcccgccgaagcgagttcttcaagacctatatctgcctcccgccggctcaactgtatcactgggtggagatgcggaccaagatgcgcatcatgggcttccggggcacggtcatcaagccgctgaacgaggaggcggcagccgagctgggcgcagagctgctgggcgaagccaccatcttcatcgtgggcggcggctgcctagtgctggagtactggcgccaccaggcgcagcagcgccacaaggaggaggagcagcgtgctgcctggaacgcgctgcgggacgaggtgggccacctggcgctggcgctggaagcgctgcaggcgcaggtgcaggcggcgccgccacagggcgccctggaggaactgcgcacagagctgcaagaggtgcgcgcccagctctgcaatcccggccggtccgcttcccacgcagtgcctgcgtccaagaaataggagcttgctggatggaacctgaatttggacatggcctatgtacctaacgtggccttcttcccgcaccacccttgcctgcgctggcccagtggaaaccaccaggatcttgatgcaacttggcatttggttacccctgctgataagagcagccattacctgccactgggaccagcaggtgaagcgttgcaacatagccccctccatcatccttcacctcctatcccccactccaaaccaggacgacctgcaaggtcccagccagcaggacaccgtgggcactctggcaaatgaaaaaatggaacctggtcttgagctgaatcaatgtgttattgttacccccacccccggtttacctgatcagtgttaacctttactgggacactcatctgttacactggaacaccttcttctttttgtcaatcggcacagaccactgtaaggaaatgcagtgtgttgcagtggccttttctccccctcaccttctaaggtcagctctagctgagcatcagtgctctcttaaggaggaaaaaaacggtgcggctgggagcggtggctcacgcctgtaatcctagcaccttgggaggccgaggcgggcggatcacttgaggtcaggagttccagaccagcctggccaacatggtgaaactccgtctctactaaaaatacaaaaattagccgggtgtggtggggtgcgcttgtaatcccagctactcgggaggctgaggcaggagaattgcttgaacccatgaggtggaggttgcggtgagccaagatggcaccattgcaccctagcctgggcaacagagcaagacaccgtcttaaaaccaaaagttaaccgggcgtggtggtgggtgcctgtaatcctagctacttgggaggctgaggcaggagaattgcttgaacttgggaggtggaggccaagattgtaccactgtattccagcccgggtgacagagcaagactgtgtctcaaaaaaaaaaaaaaaaaaa

SEQ ID NO: 1088 - DNA, 3576 bp, human
gaaaggtcacagcgcggcagcgggtctggctggcggcagcggcgggagggagccgagagacccgagtgcacgtgtggagaagcggcggcacaagcgcggcggcgggagacactcccgcccccaccagactcaagccctcactcgactctcgcggccttcgttgctcgcacagctccctgcccaggctaggaggccggcttgcggggttgagtggcccgagctaagggtgcggagacctaagggcggcgactacgacggcgttgatatcggtggtaacgacggcctcagcaggcggggaagatgaaaggtagccggatcgagctgggagatgtgacaccacacaatattaaacagttgaaaagattgaatcaggtcatctttccagtcagctacaatgacaagttctacaaggatgtgctggaggttggcgagctagcaaaacttgcctatttcaatgatattgctgtaggtgcagtatgctgtagggtggatcattcacagaatcagaagagactttacatcatgacactaggatgtctggcaccttaccgaaggctaggaataggaactaaaatgttaaatcatgtcttaaacatctgtgaaaaagatggtacttttgacaacatttatctgcatgtccagatcagcaatgagtcggcaattgacttctacaggaagtttggctttgagattattgagacaaagaagaactactataagaggatagagcccgcagatgctcatgtgctgcagaaaaacctcaaagttccttctggtcagaatgcagatgtgcaaaagacagacaactgaacaaattacaaatgaactttcttgcacttgcttgtcgccaaataaaagagaggcccattgattcctcccccaccccaacacttttcttttaaagcttttctccctccttgttcttgtttttctttcttcctttccttttctctgagagttttaatactttcaaggactttaaaaaaataatcatgtttgaattgttttctcttatttttgtgaggtggtttgaaggaaggacaaggtagatctgtttagttttgcagttgaagttagatggtcctaaacatttaattgtcaaataatttcaaatttaatgtcctgctttcacattgaagggcagagcctacaaaacattgtatatttcaaaagacaaaaagaagcagcagcagtatcttgttctctaattcatagacaagttgagtgtgtttgtggtactttgggtttttaaacactttgggatactaatccctagacattgccttcactccacctttagtccttctgagcactctctcgggagttggaacattgttatccttgtaagaaatactaagcttatgttgatttttaagtaattatatcttctcttcttgctggtgggtggggcagtttggtttagtgttatactttggtctaagtatttgagttaaactgcttttttgctaatgagtgggctggttgttagcaggtttgtttttcctgctgttgattgttactagtggcattaacttttagaatttgggctggtgagattaattttttttaatatcccagctagagatatggcctttaactgacctaaagaggtgtgttgtgatttaattttttcccgttcctttttcttcagtaaacccaacaatagtctaaccttaaaaattgagttgatgtccttataggtcactacccctaaataaacctgaagcaggtgttttctcttggacatactaaaaaatacctaaaaggaagcttagatgggctgtgacacaaaaaattcaattactgtcatctaatgccagctgttaaaagtgtggccactgagcatttgattttataggaaaaaatagtatttttgagaataacatagctgtgctattgcacatctgttggaggacatcccagatttgcttatactcagtgcctgtgatattgagtttaaggatttgaggcaggggtaattattaaacatattgcttctattcttggaaaaatagaagtgtaaaatgttaataatacaaatgtcactgtgacctcctccactgtgaggactggtttatgccagatcattttccggcacacacggagtggctttgacagattgataactttgtaagatgggagacatctgaaatattcatgttttccttttgtagtcccatctccactatttagaaatgttctcagactttaaaataatgcacagggcttgagctttctgtcatttgactttaaaaggaagtttcattcatatttatcctcttatgtaaaattgcggtataaagtctcatttccaaatatgttaaatgacaaaattattttataaaatgtttatgcacactttataaccttaagtttttatttgagaatgtgaaagtacaaagtgcagtagacttcaacaatcttgagtgccaagaataatacagaaaaagaagacagttgatgaatgagtttatagggttctaatcttaagatggtaaaaatgtagaaagaccttgctggttttttgggggtattcgtttcttaaacaatccaaatctaagcttagaagaaaagtttagcgttaagcacctttatcttcatgaataagcttcagcttgctcttggcaagagaagagtgcttgagttacagaaggcataagtagtttgaagaatgcagcagcctttttgtaaacttcccagatatcaaaatagactttgatatataaatggttttctgagatgacactgcctctatttctataaccatttcacctggactatctaaccagtcctatgaatgtatccctaaatgtggttattgaaaacctaatagctgcctcatgacaagtacatgttatttaaggaggaaaaaatattaaattttgaattgagtgtgtaggctccctatcattatatatagagtttctttttccacggtagtcagtgacttaacctgaattgtaaatgtttgtaaagggttaattgtcctacatcaaacttagttaaataattccatccacttatggaggaggaggagaatgtggaagaggtaaaaagctgggcacaagttcatatgcctatgagtcagtaaagactgaagtaatgtcctatgttgagctggttattttgatatatgataataattatctttgaagtagaacaattctgttaactggaaaatcacaggatatatccatcatatttttcaggacagatagtttttactgtggggcaaataggttaaaattacactatgttagttgcatttaggttttaaagcaaagaatctgtagagaaatctatgcaatatatagtttgtccagattagctttcatttggggaatgaagttctgaaatatctaaagcagtttactcatcaattgaaaagtcctccaaaaagagaactattgggaaaccatggtgtggtggtggaaaagaaaagctccctcagttttttggagggaataacttaaaaaaatacttaaatggctaagtttacttggtgcagttaagaattaaacttgtcaattttaacattgctgttacatctgaaataaacttatgtgatgttctggt

SEQ ID NO: 1089 - DNA, 2214 bp, human
ggcacgaggccgggacgcagggcaaagcgagccatggctgtctacgtcgggatgctgcgcctggggaggctgtgcgccgggagctcgggggtgctgggggcccgggccgccctctctcggagttggcaggaagccaggttgcagggtgtccgcttcctcagttccagagaggtggatcgcatggtctccacgcccatcggaggcctcagctacgttcaggggtgcaccaaaaagcatcttaacagcaagactgtggtccagtgcctggagaccacagcacagagggtcccagaacgagaggccttggtcgtcctccatgaagacgtcaggttgacctttgcccaactcaaggaggaggtggacaaagctgcttctggcctcctgagcattggcctctgcaaaggtgaccggctgggcatgtggggacctaactcctatgcatgggtgctcatgcagttggccaccgcccaggcgggcatcattctggtgtctgtgaacccagcctaccaggctatggaactggagtatgtcctcaagaaggtgggctgcaaggcccttgtgttccccaagcaattcaagacccagcaatactacaacgtcctgaagcagatctgtccagaagtggagaatgcccagccaggggccttgaagagtcagaggctcccagatctgaccacagtcatctcggtggatgcccctttgccggggaccctgctcctggatgaagtggtggcggctggcagcacacggcagcatctggaccagctccaatacaaccagcagttcctgtcctgccatgaccccatcaacatccagttcacctcggggacaacaggcagccccaagggggccaccctctcccactacaacattgtcaacaactccaacattttaggagagcgcctgaaactgcatgagaagacaccagagcagttgcggatgatcctgcccaaccccctgtaccattgcctgggttccgtggcaggcacaatgatgtgtctgatgtacggtgccaccctcatcctggcctctcccatcttcaatggcaagaaggcactggaggccatcagcagagagagaggcaccttcctgtatggtacccccacgatgttcgtggacattctgaaccagccagacttctccagttatgacatctcgaccatgtgtggaggtgtcattgctgggtcccctgcacctccagagttgatccgagccatcatcaacaagataaatatgaaggacctggtggttgcttatggaaccacagagaacagtcccgtgacattcgcgcacttccctgaggacactgtggagcagaaggcagaaagcgtgggcagaattatgcctcacacggaggcgcggatcatgaacatggaggcagggacgctggcaaagctgaacacgcccggggagctgtgcatccgagggtactgcgtcatgctgggctactggggtgagcctcagaagacagaggaagcagtggatcaggacaagtggtattggacaggagatgtcgccacaatgaatgagcagggcttctgcaagatcgtgggccgctctaaggatatgatcatccggggtggtgagaacatctaccccgcagagctcgaggacttctttcacacacacccgaaggtgcaggaagtgcaggtggtgggagtgaaggacgatcggatgggggaagagatttgtgcctgcattcggctgaaggacggggaggagaccacggtggaggagataaaagctttctgcaaagggaagatctctcacttcaagattccgaagtacatcgtgtttgtcacaaactaccccctcaccatttcaggaaagatccagaaattcaaacttcgagagcagatggaacgacatctaaatctgtgaataaagcagcaggcctgtcctggccggttggcttgactctctcctgtcagaatccaacctggctttatgcacctagatgtccccagcacccagttctgagccaggcacatcaaatgtcaaggaattgactgaacgaactaagagctcctggatgggtccgggaactcgcctgggcacaaggtgccaaaaggcaggcagcctgcccaggccctccctcctgtccatcccccacattcccctgtctgtccttgtgattggcataaagagcttctgttttctttggcaaaaaaaaaaaaaaaaaaaaaaaaaaaaaaaaaaaaaaaaaaaaaaaaa

SEQ ID NO: 1090 - DNA, 2051 bp, human
tggggtgtcgctccgggctggtggcggggccactgccccgcttgggggaagccgagcgatggtttgtgggcgccagttgtctggcgccgggagtgagaccctaaaacaaagaagaacacaaatcatgtcccgaggacttccaaagcagaaaccgatagaaggtgttaaacaagttatagttgtggcttctggaaagggtggagtcggaaaatctactacagcagtgaatcttgcacttgcactagcagcgaacgattcgtccaaggccattggtttgctagatgtggatgtgtatggaccttcagttccaaagatgatgaatctgaaaggaaatccggaattatcacagagcaacctaatgaggcctctcttgaattatggtattgcttgtatgtctatgggctttctggttgaagaaagtgaaccagtagtttggagaggccttatggtaatgtcggccattgagaaattgttgaggcaggtagattggggtcaactggactacttagttgtagacatgccaccaggaactggagatgtgcagttatcagtctcacagaatattcctataacaggtgctgtgattgtctccacgccccaggacatcgcattgatggatgcacacaagggtgctgagatgtttcgcagagtccacgtgcccgtccttggccttgtccaaaacatgagtgttttccagtgtccaaaatgtaaacacaaaactcatatttttggtgctgatggtgcaaggaaactagcacagacccttggtcttgaagttctaggagacattcccttacaccttaatataagggaagcttcagatacaggccagccaattgtgttttcacagcctgaaagtgatgaggccaaagcttacttgaggattgctgtggaagtggtaagaagattgccatcaccttcagaatgattccccaagtgtcctggaaatttgcctggtactgacattaagaggacctttggaaatcagcaatgtggtgatggaacctacagaaataatagaaatcataactgttttatttctaaggaaagaatgtcttcatatttgacttgctaagctaaggttcacaaaactttgatgtatcaatgttaactgctatatttaggaattttttgaaagctggtgtgtaccacctgcaaagaactgcattttattttattgaattacccctttagaaatcatgagtttatgatgttacaagtccattttgggagagaactgtacactttttgcaggaccacagaattagtaatttaaatgatatactaaatttgtgtatgggcataagtattacgccttcccaccaggcaatttggactgtctttgaatcctgtctttggtactgtcttggacatgttcttaatatgaacctctgcttcttcatctggatcacactataccccagacttaatgaatttcagtctccaggagtggagcctgaacataatgtatttttagtaagaccatgatgatgttgatgatgattctggtaatcatggcagtaagaataatagctaacatttaacaagttaattataattgttcttccatttgtgtgagtgggtactattatctccattttacagataagtaatttgagatataatttgaaggcactcaaccttgagtgtcttgctgagggttactgtatctagcaggtgatggagcttggatttgaacttgagtaattcgatattagattcatctttttgtacaccaatgtgcttttgttaattaaaaaaagtcggtggtggctaggcgtggtggctcacgcctgtaatcccagcactttgggaggttgaggtgggtggatcatgaggtcaggagttcaagaccagcctgaccaacatggtgaaaccccgtctctactaaaaatacaaaaattagctgggtgtggtggcatacgcctgtaatcccagctactcgggaggctgaggcaggagaatcatttcaacccgggaggctgaggttgcagtgagtggagattgtaccactgcactccagcctggtcaatggagtgcgactccatctc

SEQ ID NO: 1091 - DNA, 1889 bp, human
agagcctcgagcctgcgaggagcgcgccgcccgccagctccctgcgtcccgtcccgcgtccccgcgttcccgcgtcctgcgatccgccgccatggccagtgaggagctggcgtgcaagctggagcgccggctgcggcgcgaggaggccgaggagagtggcccccagctggctcccctcggcgccccagccccggagcccaagcccgagcccgagcctcccgcccgtgcgcccacggccagcgccgacgcggagctgagcgcccagctgagccggcggctggacatcaacgagggcgctgcgcggccccggcgctgcagggtcttcaacccctacacggagttcccggagttcagccgccgcctcatcaaggacctggagagcatgttcaaactgtatgacgctgggcgggatggcttcatcgacctgatggagctgaagctgatgatggagaagctgggggccccccagacccacctgggcctgaagagcatgatcaaggaggtggatgaggacttcgatggcaagctcagcttccgggagttcctgctcattttccacaaggccgcggcaggggagctgcaggaggacagtgggctgatggcgctggcaaagctttctgagatcgatgtggccctggagggtgtcaaaggtgccaagaacttctttgaagccaaggtccaagccttgtcatcggccagtaagtttgaagcagagttgaaagctgagcaagatgagcggaagcgggaggaggaggagaggcggctccgccaggcagccttccagaaactcaaggccaacttcaatacatagtcctgctgaccttgccctctgcccacagctgtgcctcacagatgccccgagaagagatgactaggcatcttcatcactgctgtcggtcccctccctgagccagcatctccatccaccaccccgtgccagctcccgtgccagccttcattcctcccagtgtccaagcccctccaggagggtcctggggtgggccagatgcctgcccacctctgtctcctgcctctgctcctctgcccttcttatagccagaacttgtatcttctcagcaaccttcactttgtccttgtccctttaccattccccatcaaagagtagtctgctatatcaatttgtgtagatatgtctgtctttttgggtcctcagagaaaatgcccattttctcggagaattctctgcactcctctctgcttcacattcaacttccctgttctcatctttggtaggattctgccagttgcttttgcatcttctgttcctgggtaatggtgggtcttaatggaggctgggtggaccactgcccgtccactcttcaacaggaggaacagcatgccaccacagtaacacacattagagaaaggacagaggtctgctccttcctgccacctttctcctggccccttagcattcccccagtccctccctcttcaccttgctccgtctatgtcttcccagctcagccttttccccactcttaaatactgtactacttcactgtaagaacgaaagaatagttaggataccaatgagtaaaagggttcctgttcactctgactctgtgcaaattgtattacagtagaccgctgacgttcccaagtgacagatccagggcctttcaaacatccccaaagtcatggccatactcaccattagccagtttctaacatctgtttcagggtatccagctgtagatgttcttatcccccatacttgtgagttattggggttgctcacaaatactaggggtttttgttgtatttttaacaaatatatcctaatgtcatatttattctcttttgtaactgctgtctttacaataaagaaatcatctgcctttctaaaaaaaaaaaaaaaaaaaaaa

SEQ ID NO: 1092 - DNA, 2218 bp, human
cccgggacatgaggaaaggaacaagggaaagagccggtgaaggggcagaacaggcaggtgagagtctaagagggctcagtaatctgaagcttggtgggaagaagggattctgggctagaaagggtgcagaagcctgaagtagaaagagacgggattttggtccggggtggagagcgaatgcattgaaaagggccaaggcccaggataaggtagacatttaaaggggtacggatgcccaaggtagagcagacacttgaggagaccagctcagcaaacggaagacacttaaagtggtaggttctcaagagagaagaagtttttaagactagagctaagcaagacatttaaaaggacatgggttgggatttgggaacacgtttattccagaggcaggaacaaaggagtcgcttgtcaaggatctggttagagaagactagggtcttcctcgaaggaagcacgcgcacgcctgctctcccccattgtcttttctggcttctccaggttccctcgacccaggaccccctgttcccaggctatggcccccagtgccctgtagacctggcaggccccccgtgcttgcgacccctatttgggggtctgggtggctactggagggccttgcagaggggcagagaaggcaggaccatgacatctagggcctctgaactttctccggggcgcagcgtgacggctggcatcatcattgttggagatgagatccttaagggacacactcaggacaccaacaccttctttctgtgccggacactgcgctccctaggggtccaggtttgccgagtctcagttgtacctgatgaggtagccaccattgcagctgaggtcacttctttctccaaccgcttcacccatgtcctcacagcagggggcatcggccccactcatgatgatgtgacctttgaggcagtggcacaggcctttggagatgagctgaagccacaccccaagttggaagcagccaccaaagccctaggaggggaaggctgggagaagctatcattggtgccctcctctgcccgcctgcattatggcacagatccttgcactggtcaacctttcagattccctctggtctccgtccgaaacgtctacctcttcccaggcattccagagctgctgcggcgggtgctggaggggatgaagggactattccaaaacccagctgttcagttccactcaaaggagctatatgtggctgctgatgaagcctccatcgcccccattctggctgaggcccaggcccactttggacgtaggcttggcctgggttcctaccctgactggggcagcaactactatcaggtgaagctgactctagactcagaggaagaaggacccctggaggaatgcttggcctacctgactgcccgtttgccccagggatcgctggtcccctacatgcccaacgctgtggagcaggccagtgaggctgtatacaaactcgctgaatcagggtcttctttggggaaaaaggtggcaggtgccctacagaccattgagacctccctggctcagtacagcctcacccagctctgtgtgggcttcaacgggggcaaagactgcactgccctcctgcacctcttccatgcagctgtgcagaggaaattacctgatgttccaaaccccctccagatcctgtatatccgcagcatctcccctttccctgagctggaacagtttctacaggacactatcaagaggtataatctgcagatgttggaagctgagggcagcatgaagcaggccctgggtgaactgcaggcacggcacccccagctggaggctgtccttatgggcacccgccggactgacccctactcctgtagcctctgccctttcagccccactgacccaggctggcccgcattcatgcgcatcaacccactgctggactggacctacagagacatctgggattttctgcgtcagctgtttgtcccatactgtatcctgtatgaccgaggatacacatcactggggagtcgggagaataccgtgcggaacccggccctgaagtgcctgagcccaggaggacaccccacataccgtccagcctatctactggagaacgaagaagaggagcggaactcccgcacatgacctcccaccctaggagggagggaaggacaccgtcctagggtataacctggcaataaaccgtgcctctcactgtgaaaaaaaaaaaaaaaaaaaaaaaaaa

SEQ ID NO: 1093 - DNA, 4208 bp, human
gagatgcgtgacgagcgaagcgcgtgacggaggagcggttggccaacgcagtggcggcagtcggtgtaaacaaggcctcgcgccgctgcgggtcctgcgaccgctcctggctggtgggtggtctcgcgtggggcggttaccgccggcttcagtgggaggtgcttctcggcttcctccccctcatggcgtacacacccccggcgcaccacgtgggcgtgaggcgaggaaggaggggtgttaggccaaattctattttcattggctgtcactgctgccggcctttgtaagggggcgctctgattggtcgataaggtgggggcgtcgagggtctttgagtcctaaggcttctaattggttagatgagataagctagtgaagcgctttcttccgagagggatttcgattggtcggtcagagaggttacctggaaatccaacaccgcccaacacccctcccgctccccagtccggggacttcgataggattggagaaggtttgtgttcccgacgccttggtagttggcataggctaaagaaaagggatctcagccccgaggaagggtcaccctcctagagatagctactaccccgtctcaggagaccctggtatttctagagcacgctttgctttcaccaaacccaaggaggtgacaggaggagcccccgcacaggacctaagaatgctgtgaccagaagatgggatcgcggaacagcagcagtgcaggatccgggtccggagacccctccgagggcttgccccgaagaggggctggcctgcgtcggagtgaggaagaggaagaagaggatgaagatgtggatctggcccaggccctcttggactcagaggaagagaatgacagagcttgggatggtcgtcttggggatcgatacaacccacctgtggatgctacccctgacacccgggagctggaattcaatgagatcaagacacaagtggaactggccacagggcagctggggcttaggcgggccgcccagaagcacagctttcctcgaatgttgcaccagagagaacggggcctctgccatcggggaagcttctcccttggagaacagtctcgagtgatatctcacttcttgcccaatgatctgggcttcactgatagctactctcagaaggctttctgtggcatctacagcaaagatggtcaaatattcatgtctgcttgccaagaccagacaatccgactctatgactgccgatatggccgtttccgtaaattcaagagcatcaaggcccgcgacgtaggctggagcgtcttggatgtggccttcacccctgatgggaaccacttcctctactctagctggtctgattacattcatatctgcaatatctatggtgagggagatacacacactgccctggatctcaggccagatgagcgtcgctttgctgtcttctccattgctgtctcctcagatggacgagaagtactaggaggggccaatgatggctgcctgtatgtctttgaccgagaacagaaccggcgcacccttcagattgagtcccatgaggatgatgtgaatgcagtggcctttgctgatataagctcccaaatcctgttctctgggggagatgatgccatctgcaaagtgtgggatcgacgcaccatgcgggaggatgaccccaagcctgtgggtgcactggctggacaccaggatggcatcaccttcattgacagcaagggtgatgcccggtatctgatctccaactctaaagaccagaccatcaaactctgggatatccgacgcttttccagccgggaaggcatggaagcttcacgccaggctgccacacagcaaaactgggactatcggtggcagcaagtgcccaaaaaagcctggcggaagctgaagctcccaggggacagctccttgatgacctaccggggccacggagtgctgcacaccctcatccgctgccggttctcccccattcatagcactggccagcagttcatctacagtggctgctccactggcaaagtggttgtgtacgaccttctaagtggccacattgtgaagaagctgaccaaccacaaggcctgtgtgcgtgacgtcagttggcacccctttgaagagaagattgtcagcagttcgtgggacgggaacctgcgtctgtggcagtaccgccaggctgagtacttccaggatgacatgccagaatctgaggaatgtgccagcgcccctgccccagtgccccaatcctctacacccttttcctcaccccagtagatccaacctccagccccatatagggtgaacctcttgataagctctctgcctcctcctccctttctcccttgtggggaatgtttggaggaatcactggcatttgatggggaataacataagcctgggctctgagcctcagctgagccctggaagattctccccatggggcagagtggtctccttacgtgctcacacccagtcagcttgggtccctatctctggccagagtttggcaggactgccattatctggggtgtggcctctgccagcaagagaagtgtcctgggtgtttttaatcatgtttgaatgttaggggttggatcctagagtagatgcctgaggccacatctgaacagacctgtcagccaggcctgccaggtcttcacgttgaggattcaactggccaatcacaggacaggtgtcctggcctttcttcctgaggtctctaggggaggggcatgggtaagggtgtttcctcagcaccctcctggggtggggattatgtctgctgtcatgtctgggtctttagggtaggacaggctgtggtatgagaggcaggagtctccacaaggcttcatgtggccccttatagggcaggccctgccctctgggaaggtcccttcatgctggaggcacacagctttaaggaagtaggttgaagtaggactccttcgtcctctcactggctttggctccctcaataaactgtgtgggaacctggctcagtgtctgtctctctctctcactctctgtttttcctatctgaggtctttcatctcctcacttcaggaaaacacagttcagcaaagtcttcagatgcgatcctgtgtaggagaaaatacccttctggtgccccatgaaaaagggaaataccaaaaccatttgttcactgagccttgcaataggtgctcccttaccaatttcagaagcttccctgcaagtagatatcgagagagcacactttccattagagcctggtaatacccatatcacctctgctctgaggctgggcctgcagctgtgtagtctttggaagaggtagcccctgaacgcagagcctaagagaagcaagtcggccctgacgccaggccccagtgggcgcctcacactcagaacctcataccccagagcaaaccgatggtcagggagagggctagagctcacacccagctcggaatagatcttccctgatgacatttcatgccctctaaggcagtttttaaatgaaggtacacacatccaggggtgttcacaggctttcacagcaagggtacctatttcatggcaaaataggcagttttaaaagaataaacaagctaggtgtggtggctcatgcctgtaatcctagcactttgggaagccaaagctgatggatcgcttgagcccaggagtttgagaccagcctgggcaacatggcaaaaccccatctctacaaaaaatacaaaaagtaggccgggcacggtggttcacacctgtaatcccggcattttgggaggccgagataggtggatcacctgaagtcaggtgtttgagaccagcctggccaacatggtggaacccaatctctactaaaaatacaaaaaaactagccggatatggtggcgggtgcctgtaatctcagctacttgagaggctgaggcaggagaatcgcttgaacttgggagcagaggtgagctgagtgcagtgagccaagaccatgccattacactcaagcttgggcaacgagagcaaaactctgtctcaaaaaaaaaattagccagatgtggtgacgcatgcctgtagtcctagctactcaggaggctgaggtgggaggatcacctaaggccaggaggtcaaggctgcggtgagccgtgattgtgccaatgtactccagcctaggtgacagagtgagaccctgtctcaaaaataaataataaataaataaatgttcagaaaaaaaaaaaaaaaaaa

SEQ ID NO: 1094 - DNA, 2840 bp, human
ggtggggttgcgctcacaaggggcgaccgtcgccacggtggcggccactgcatcgcgtcccacctccgcggccctgggcgccgtggtgtcgacgggccccgagcctatgacgggccagggccagtcggcgtccgggtcgtcggcgtggagcacggtattccgccacgtccggtatgagaacctgatagcgggcgtgagcggcggcgtcttatccaaccttgcgctgcatccgctcgacctcgtgaagatccgcttcgccgtgagtgatggattggaactgagaccgaaatataatggaattttacattgcttgactaccatttggaaacttgatggactacggggactttatcaaggagtaaccccaaatatatggggtgcaggtttatcctggggactctactttttcttttacaatgccatcaagtcatataaaacagaaggaagagctgaacgtttagaggcaacagaataccttgtctcagctgctgaagctggagccatgaccctctgcattacaaacccattatgggtaacaaaaactcgccttatgttacagtatgatgctgttgttaactccccacaccgacaatataaaggaatgtttgatacacttgtgaaaatatataagtatgaaggtgtgcgtggattatataagggatttgttcctgggctgtttggaacatcgcatggtgcccttcagtttatggcatatgaattgctgaagttgaagtacaaccagcatatcaatagattaccagaagcccagttgagcacagtagaatatatatctgttgcagcactatccaaaatatttgctgtcgcagcaacatacccatatcaagtcgtaagagctcgtcttcaggatcaacacatgttttacagtggtgtaatagatgtaatcacaaagacatggaggaaagaaggcgtcggtggattttacaagggaattgctcctaatttgattagagtgactccagcctgctgtattacctttgtggtatatgaaaacgtctcacattttttacttgaccttagagaaaagagaaagtaagctcaaagaggacaattccagtatatctgcccaaggcagcaacaagctcttttgtgtttaaggcataaaagaagaattctgcatagaaacatggctcatattcgaaattgctctatagtcattagaagccagagaactgctaagtctcctgcaatgtttttctgctttttgccttccccatatatatggaacttggctacctctgcctgaaatggctgccatcaacacaatgttaaaactgacacgaaggatagagtttcacagatttctacgttttattggtggaagctgatttgcaacatttgctaaatggattagatgaatgtacttctttttgtgagcttacttgcctggattgctttaaaattaacctttgtgcaataccaagaaaatagctctttaaaagaatgtctttgtatgtctcaaggtaaattaaggatttactgaataaggtgttgaccaaatccagaccattttattttatttttttatttatttattttttgagatggagtcttgctttgtcgcccaggctggagtgcagtggcgtgatctcagctcactgcaacctccacctcccgggttcacgccattctcctgcctcagcctcctgagtagctgggactacaggcacctgccaccacgcctggctaacttttttttatattttgagtagaaatggggtttcaccatgttagccaggatggtctcaatctcctgaccttgtgatccgcctgccttggcctcccaaagtgctgggattacaggcgtgagccactgcgcctggccagaccattttagaattgggaaattttagtgagaaaaaatgcactgtaaatatgctttagttttaattcagttgggatgcactacctagcgaaaattgagaaactatatacttctcagagaaatatctgacatctattgtcattccattgctattttttttccccagagacttccataatttaaaataaaatcctagatccagttcttgttttttggcataaatacttaatctattttaaatttataaaatctgagcttctaggatccagctgtgtcaacctttatttagcatatataactataaatcacttattacagatgctaaatagatcaccttttacagatgctgaaatgtttgggatatgtttgttgacaaggtaaatggaaatgagaaactttatacttcagttttcagatatatggatctagatcccaaataaatgattaatcttcattggtttctcaaattcaggttgaaatacaaattaatagcctttattgattttacttttatgagtcattgtagacatctataaatataaaagggcctgtacccaaaggatgccagaatactagtatttttatttatcgtaaacatccacgagtgctgttgcactaccatctatttgttgtaaataaaagtgttgttttcaaagccatctttaaatagttctttaaaaataggtcttttttttatattttggaaaaggcattgtttttaaagtaaagataaaatggtaagtacctaattgtatttactgtaatatcttataacatgcagatgaatgctttataagttaaatatgatgtattttttcatacttctggattatactataattcatatgaaatcttgatattagtccccacacggaaaaagtgaactgcagttgatatttggtgtttaagatagcaccattgtttaaataccgcctatgtactcccaaatgaataaaacataattcttgtcctctgagagcataaaaaaaaaaaaaaa

SEQ ID NO: 1095 - DNA, 2478 bp, human
caccctggcccgctccccgcgccctccacgggtaacggccccctctctcggtgctcagaaaccggcggtgtcgacaggtggctctcgcttggcctccttgtctgcaagcctttctcctagagatctgtgcctcctggcgaaccatgggagacctgccgccctaccctgagcgccctgcccagcagcctccgggccggaggacttctcaggcctcccagaggcggcacagtcgggaccaagctcaggccctggcagcggaccccgaggagaggcagcagatacctccagacgcccagcgaaacgcccctggttggtcacagaggggcagcctgtcccaacaggagaacttgctgatgccccaggtcttccaggctgaggaagcccggctgggtggcatggagtacccatctgtgaacacgggctttccctcagagttccagcctcagccttactctgatgaaagcaggatgcaggtcgccgagctcaccaccagcctaatgctgcagcggctccagcagggccaaagcagcctgttccagcaactggaccccaccttccaggagcccccagtcaaccccttgggccagttcaacctctaccagacagaccagttctctgaaggtgcccagcacgggccttacataagggatgaccctgcccttcagttcttgccctctgagctgggcttcccacactacagtgcccaggtgcctgagcccgagcctctggagctggccgtgcagaacgccaaggcctacctgctgcagaccagcatcaattgcgacctcagcctgtacgagcacctggtaaatctgctgaccaagatcctgaaccagcggcctgaggaccccttgtctgtcctggagtctctgaaccgcaccacgcagtgggagtggttccaccccaagctggacacgctgcgggacgaccccgagatgcagcccacctacaagatggcggagaaacagaaggcgctgttcacccggagtggaggcggcactgaaggcgaacaggagatggaggaggaggtgggggagacaccagtgcccaacatcatggagactgccttctacttcgagcaggccggcgtcggcctgagctcggacgagagcttccgcattttcctggccatgaaacagctggtggagcagcagcccatccacacctgtcgcttctggggcaagatcctgggaatcaaacgcagctacctggtggccgaggtggaattccgggagggcgaggaggaggcagaggaggaggaggtggaggagatgacggaaggtggcgaggtcatggaggcgcacggcgaggaggagggcgaggaggacgaggagaaggccgtggacatcgtccctaagtccgtatggaagccgccgcccgtgatccccaaggaggagagccgctcaggcgccaacaagtacctgtactttgtgtgcaacgagccgggcctgccatggacgcggctgccccacgtcactccagcccagatcgtgaacgcccgaaagatcaagaagttcttcacaggctacctggacacgccagtcgtcagctacccacccttcccgggcaacgaggccaactacctgcgggcccagatagcccgcatctcggccgccacgcaggtcagcccgctgggcttctaccagtttagtgaggaggagggcgacgaggaggaggaaggtggtgctgggcgcgactcctacgaggagaacccggacttcgagggcatccccgtgctggagctggtcgactccatggccaactgggtgcatcacacacagcacatcctgccgcagggccgctgcacttgggtgaaccctttgcagaagacagaggaggaggaggacctgggggaggaggaagagaaggcagatgaggggccagaggaggtggagcaggaggttggccccccactgctaacgccactttcagaagatgcagaaatcatgcacctggcaccctggaccacccgcctgtcctgcagcctctgcccgcagtactcagtggccgttgtgcgctccaacctctggcccggggcctatgcctatgccagtggcaaaaagtttgagaacatctacatcggctggggtcacaagtacagccccgagagcttcaacccggccctgccagcccccattcaacaagagtaccccagtggcccagagatcatggagatgagtgaccccacagtggaagaggagcaggctctgaaagcagcccaggaacaagccctgggagccacagaggaggaggaggagggcgaggaggaggaggagggcgaggagacagatgactgaggcccaccctctagccactttccccaagcaggtagatagcaaatttccccttagaggtagttagcatggattatattttcactatgtgcttcctgtccccagagggcagggatagaaaaggaaggcaactgcttcaaataaaattcctccacggcattaaaaaaaaaaaaaaaaaaaaaag

SEQ ID NO: 1096 - DNA, 1807 bp, human
cgtcacttcctgttgccttaggggaacgtggctttccctgcagagccggtgtctccgcctgcgtccctgctgcagcaaccggagctggagtcggatcccgaacgcaccctcgccatggactcggccctcagcgatccgcataacggcagtgccgaggcaggcggccccaccaacagcactacgcggccgccttccacgcccgagggcatcgcgctggcctacggcagcctcctgctcatggcgctgctgcccatcttcttcggcgccctgcgctccgtacgctgcgcccgcggcaagaatgcttcagacatgcctgaaacaatcaccagccgggatgccgcccgcttccccatcatcgccagctgcacactcttggggctctacctctttttcaaaatattctcccaggagtacatcaacctcctgctgtccatgtatttcttcgtgctgggaatcctggccctgtcccacaccatcagccccttcatgaataagttttttccagccagctttccaaatcgacagtaccagctgctcttcacacagggttctggggaaaacaaggaagagatcatcaattatgaatttgacaccaaggacctggtgtgcctgggcctgagcagcatcgttggcgtctggtacctgctgaggaagcactggattgccaacaacctttttggcctggccttctcccttaatggagtagagctcctgcacctcaacaatgtcagcactggctgcatcctgctgggcggactcttcatctacgatgtcttctgggtatttggcaccaatgtgatggtgacagtggccaagtccttcgaggcaccaataaaattggtgtttccccaggatctgctggagaaaggcctcgaagcaaacaactttgccatgctgggacttggagatgtcgtcattccagggatcttcattgccttgctgctgcgctttgacatcagcttgaagaagaatacccacacctacttctacaccagctttgcagcctacatcttcggcctgggccttaccatcttcatcatgcacatcttcaagcatgctcagcctgccctcctatacctggtccccgcctgcatcggttttcctgtcctggtggcgctggccaagggagaagtgacagagatgttcagctacgagtcctcggcggaaatcctgcctcataccccgaggctcacccacttccccacagtctcgggctccccagccagcctggccgactccatgcagcagaagctagctggccctcgccgccggcgcccgcagaatcccagcgccatgtaatgcccagcgggtgcccacctgcccgcttccccctactgccccggggcccaagttatgaggagtcaaatcctaaggatccagcggcagtgacagaatccaaagagggaacagaggcatcagcatcgaaggggctggagaagaaagagaaatgatgcagctggtgcccgagcctctcagggccagaccagacagatgggggctgggcccacacaggcgtgcaccggtagagggcacaggaggccaagggcagctccaggacagggcagggggcagcaggatacctccagccaggcctctgtggcctctgtttccttctccctttcttggccctcctctgctcctccccacaccctgcaggcaaaagaaacccccagcttcccccctccccgggagccaggtgggaaaagtgggtgtgatttttagattttgtattgtggactgattttgcctcacattaaaaactcatcccatggccagggcgggccactgtgctcctggaaaaaaaaaa

SEQ ID NO: 1097 - DNA, 2501 bp, human
gaacctcctcgcgactttccaaggtatctttcagatgaaggcattgaagcttgcacaagctctccagacaaagtcaatgtaaatgacatcatcctgattgctctcaatatctgagaacaattggcaagaaattcctccccagtgacatcaatagtggaaaggtagaaaagctcgaaggtccatgtgttttgcaaattcaaaaaattcgcaatgttgctgcaccaaaggataatgaagaatctcaggctgcaccaaggatgctgcgattacagatgactgatggtcatataagttgcacagcagtagaatttagttatatgtcaaaaataagcctgaacacaccacctggaactaaagttaagctctcaggcattgttgacataaaaaatggattcctgctcttgaatgactctaacaccacagttcttggtggtgaagtggaacaccttattgagaaatgggagttacagagaagcttatcaaaacacaatagaagcaatattggaactgaaggtggaccaccgccttttgtgccttttggacagaagtgtgtatctcatgtccaagtggatagcagagaacttgatcgaagaaaaacattgcaagttacaatgcctgtcaaacctacaaatgataatgatgaatttgaaaagcaaaggacggctgctattgctgaagttgcaaagagcaaggaaaccaagacatttggaggaggtggtggtggtgctagaagtaatctcaatatgaatgctgctggtaaccgaaatagggaagttttacagaaagaaaagtcaaccaaatcagagggaaaacatgaaggtgtctatagagaactggttgatgagaaagctctgaagcacataacggaaatgggcttcagtaaggaagcatcgaggcaagctcttatggataatggcaacaacttagaagcagcactgaacgtacttcttacaagcaataaacagaaacctgttatgggtcctcctctgagaggtagaggaaaaggcagggggcgaataagatctgaagatgaagaggacctgggaaatgcaaggccatcagcaccaagcacattatttgatttcttggaatctaaaatgggaactttgaatgtggaagaacctaaatcacagccacagcagcttcatcagggacaatacagatcatcaaatactgagcaaaatggagtaaaagataataatcatctgagacatcctcctcgaaatgataccaggcagccaagaaatgaaaaaccgcctcgttttcaaagagactcccaaaattcaaagtcagttttagaaggcagtggattacctagaaatagaggttctgaaagaccaagtacttcttcagtatctgaagtatgggctgaagacagaatcaaatgtgatagaccgtattctagatatgacagaactaaagatacttcatatcctttaggttctcagcatagtgatggtgcttttaaaaaaagagataactctatgcaaagcagatcaggaaaaggtccctcctttgcagaggcaaaagaaaatccacttcctcaaggatctgtagattataataatcaaaaacgtggaaaaagagaaagccaaacatctattcctgactatttttatgacaggaaatcacaaacaataaataatgaagctttcagtggtataaaaattgaaaaacattttaatgtaaatactgattatcagaatccagttcgaagtaatagtttcattggtgttccaaatggagaagtagaaatgccactgaaaggaagacgaataggacctattaagccagcaggacctgtcacagctgtaccctgtgatgataaaatattttacaatagtgggcccaaacgaagatctgggccaattaagccagaaaaaatactagaatcatctattcctatggagtatgcaaaaatgtggaaacctggagatgaatgttttgcactttattgggaagacaacaagttttaccgggcagaagttgaagccctccattcttcgggtatgacagcagttgttaaattcattgactacggaaactatgaagaggtgctactgagcaatatcaagcccattcaaacagaggcatgggaggaagaaggcacctacgatcaaactctggagttccgtaggggaggtgatggccagccaagacgatccactcggccaacccaacagttttaccaaccaccccgggctcggaactaataggaaaagactctttgtgaagaaacgagccagtgactgaaacaccctggtggaaacctgttgacagaccttccactttctcttcagaataagtagctgtggtggatattattatttgaagaaagaaaaaacagattttagggtggaaaaaacagtcaactcacacaaagaatggaaaaaaatactgagttaaattaagcaaataccttttacaagtgaaaggaagaatttttcttctgccgtcaataaaaccattgtgctattattgtttaaaaaaaaaaaaaaaaa

SEQ ID NO: 1098 - DNA, 2538 bp, human
tgcctttcgctgcttgttggggttacaggtgaaggggttatgggtgaagaacaacccagggccagcgcttggccttcccgccaccgtggcggccgccccgcgctgtctgtgaggcgccagttccggggcgctgctcccggcctcccctcgctctgaggctcggggtccccagctccgcgtaaactgcacgatttcgccctctgctcagctcccctctgccccctctttccaagagagacttccagatcccacattttcttgactgatttttaagcatttcttcgtttatagctgtctgtttgcattctgattgggaacactgggatcattttcatcatgccgacagtggtggtaatggatgtatccctttccatgacccgacctgtgtctattgaggggtccgaggaataccagcgtaagcacctagcagcccatggtttaacgatgctgtttgagcacatggccacaaattacaagcttgaatttacagcacttgtggttttttcatcactttgggagttgatggtccccttcacgagagattataataccctacaggaagcactaagtaatatggatgattatgacaaaacctgcttggggtctgcattagttggtgtttgcaatatcgttcagcaagaatggggtggtgcaattccttgccaggttgtcctggtgacagacggctgtcttggcattggtagagggtcactgcgacattccctagccactcaaaatcaacgaagtgagagcaacaggtttccactaccttttcctttcccatctaagttatatatcatgtgcatggcgaatttggaggagctccagagcaccgattccttggaatgccttgaacgtctcatagatttaaacaatggtgaagggcagatttttactattgatggccccctgtgcttgaagaatgtacagtctatgtttggaaaactgataggtttggcatatacgcctttccatgctgttctcaagtgtggccacctaactgctgatgtacaagtcttccccaggccagaaccttttgttgtagatgaagaaattgatcctatccctaaagtcattaacacagatttggaaatagtgggatttattgatatagctgatatctcaagtcccccagttctgtccagacatctggtcttacctatagcacttaacaaagaaggtgatgaggtgggtactggcatcactgatgacaatgaagatgaaaattcagccaatcagattgcaggcaaaatacccaacttttgtgtcctgctccatggtagcctaaaagtggaaggaatggtagcgattgttcaattaggtcctgaatggcatggaatgctctactcccaagctgacagcaagaagaaatcaaacctcatgatgtctctctttgagcctggcccagaacctctcccatggctagggaaaatggcacagttgggtcctatttcagatgctaaagaaaacccttatggcgaggatgacaataagagtccattccccctgcagcccaaaaacaagcgcagttatgcccagaatgtgactgtctggatcaaacccagcggcctgcagacagatgtacagaagattttaagaaatgcaaggaaactacctgaaaaaacacagacattctataaggagctgaaccgtttgcgaaaggccgctctagcctttggtttcctggacctgctgaaaggggtggctgacatgctggaaagggaatgcacactgctgcctgagacagcccaccctgatgctgcattccagctgacccatgctgcccagcagctcaagctggccagtaccggcacctctgagtatgccgcttatgaccagaacatcacacctttgcacacggacttctctgggagcagcactgaaagaatttgaaactgacttttggagctttccttcttttttcatttcaactgaaaatgctttaggtaaaaacctttccagtatgttcacctctagaatagccacccaaagaccttcctgaggctgcctcagaagcaccacttgctgttttgaatgactctactagtatgagaaggatgtgaaggtggttggctggttgggctttaacttcctgggattcataatttttaagcttggaagatagctgctgttcccatgatgggcacatttcctgagaagcttgaatgactgatgagcatagagcacccctgccttcctcaggaaacctgaccggcaggggctctctggcttcctgaaagcttcacctcttccctcgtttatatctcaactgtaagggcattttcaagcttctgttcatggaatgagcaactcagactgtctggagcttgctgagtacaaacacaccaccactaagtttcagaactttccttaggacttgggcaaaatgtggtggtaactcttaagtgcttttggtatctcttgagattctaacttttaaagagcaaccattaatgtgtaaaatgattcctattattcaaggtttttttttaatgaaaataaaatatttgattttctagaaaaaaaaaaaaaaaaaaa

SEQ ID NO: 1099 - DNA, 2118 bp, human
aaaaaaaagaaaccaggcggcgcgttcccggtggcggcgccctggactcccgggcccgcgcatccccgccagccttccttaaggcggatgggtggcccccgagaccccgtcggacccatggtttccagtgcagcgcggagtgggcggtgccagcgtgccaggagccatgtctgaccaggacgtttggaagatcatatccatgccagaggctcttgtggggagatgagttggtaaagagagaggctgggatgaagatgctgccaggagtggacgtgtttgggactggcagctccgcccgagttctggtcccactgctgagggcagaagggttcactgttgaggccctgtgggggaagactgaggaggaggcgaagcagcttgctgaggagatgaacatcgccttctacaccagccggactgatgacatcttgctgcatcaagatgtggatctggtgtgcatcagcatcccccctccactcacccggcagatatccgtgaaggctctaggtattgggaagaatgtggtttgcgagaaggcagcaacatcggtggatgccttccggatggtgacagcctcgcgctactacccgcagctcatgagcctggtagggaacgtgctgcgcttcctgcctgccttcgtgcgcatgaaacagctgatttcggaacactatgtgggagcggtgatgatctgtgatgcccgcatctactcaggcagcctgctgagccccagctatggctggatctgtgatgagctcatgggcggcgggggcttgcacaccatggggacctacattgtggacctgctgacccacctgaccggccggagagccgagaaggtgcacgggctgctcaagacattcgtgaggcagaacgctgccatccgtggcatccggcacgtcactagcgatgacttctgtttcttccagatgctcatgggtgggggtgtgtgtagcacagtgacactcaacttcaacatgccaggcgcctttgtgcatgaagtcatggtggtaggctctgcaggacgcctcgtcgcccggggagccgacctctatgggcagaagaactctgccacgcaagaggagctgctcttgagggactcgctggcagtgggcgcaggactgcctgagcaggggccccaggatgtcccgctgctgtacctgaagggcatggtctacatggtgcaggccttgcgccagtccttccaggggcagggcgaccgccgcacctgggaccgcacccctgtctccatggccgcctccttcgaggatgggctgtacatgcagagcgtggtggatgccatcaagaggtcgagccgatccggggagtgggaggctgtggaggtgctgacggaggagcccgacaccaaccagaacctgtgtgaggcacttcagcggaacaacctatgagcctgcacctgggctccttgccacagggcagagggaccagggaggggaacaggagccagacatgacagggacttggccctagcagagacagtgtctttcatttgatgagtctgggtgaagccagaggtggctctgggacttcgccccctccagtggctcacctgctcctcagacttgcagggtggcaaatgttcctgttgccaggttaccacggtgtgcacagggcagagctgccgccaggcctcctcatggtgatgccagtgagtcggaccaggaaaggctcaccctggggagcccttcagcctgatccgcagtcctaacagggtgagaaagcacaagaggggccagctcggctgaggcctgaggagaaatgatgagaagttttgtttcgttcttgggctggggcatctcaggaacagtgagggcaacaagctgtccctcagggaccctcacctgccctcccatgtgaccaggcccttcccaggtggggactggggcttgctttattaagtgagctcttgggcttttgaagtaggacagagggccctggtttggcagagaggaggcaagggagggctttagaacatctgagaaatgttaataaataattcagaaaataaaaaaaaaaaaaaaaaaaaaaaaaaaaaaaaaaaaaaaaaaaaaaaaaaaaaaaaaaaaaaaaaaaaaaaaaaaaaaaaaaaaaaaaaaaaaa

SEQ ID NO: 1100 - DNA, 2154 bp, human
gccttcctgggattggagtctcgagctttcttcgttcgttcgtcggcgggttcgcgcccttctcgcgcctcggggctgcgaggctggggaaggggttggagggggctgttgatcgccgcgtttaagttgcgctcggggcggccatgtcggccggcgaggtcgagcgcctagtgtcggagctgagcggcgggaccggaggggatgaggaggaagagtggctctatggcggcccatgggacgtgcatgtgcacagtgatttggcaaaggacctagatgaaaatgaagttgaaaggccagaagaagaaaatgccagtgctaatcctccatctggaattgaagatgaaactgctgaaaatggtgtaccaaaaccgaaagtgactgagaccgaagatgatagtgatagtgacagcgatgatgatgaagatgatgttcatgtcactataggagacattaaaacgggagcaccacagtatgggagttatggtacagcacctgtaaatcttaacatcaagacagggggaagagtttatggaactacagggacaaaagtcaaaggagtagaccttgatgcacctggaagcattaatggagttccactcttagaggtagatttggattcttttgaagataaaccatggcgtaaacctggtgctgatctttctgattattttaattatgggtttaatgaagatacctggaaagcttactgtgaaaaacaaaagaggatacgaatgggacttgaagttataccagtaacctctactacaaataaaattacggccgaagactgtactatggaagttacaccaggtgcagagatccaagatggcagattcaatctttttaaggtacagcagggaagaactggaaactcagagaaagaaactgcccttccatctacaaaagctgagtttacttctcctccttctttgttcaagactgggcttccaccgagcagaaacagcacttcttctcagtctcagacaagtactgcctccagaaaagccaattcaagcgttgggaagtggcaggatcgatatgggagggccgaatcacctgatctaaggagattacctggggcaattgatgttatcggtcagactataactatcagccgagtagaaggcaggcgacgggcaaatgagaacagcaacatacaggtcctttctgaaagatctgctactgaagtagacaacaattttagcaaaccacctccgtttttccctccaggagctcctcccactcaccttccacctcctccatttcttccacctcctccgactgtcagcactgctccacctctgattccaccaccgggttttcctcctccaccaggcgctccacctccatctcttataccaacaatagaaagtggacattcctctggttatgatagtcgttctgcacgtgcatttccatatggcaatgttgcctttccccatcttcctggttctgctccttcgtggcctagtcttgtggacaccagcaagcagtgggactattatgccagaagagagaaagaccgagatagagagagagacagagacagagagcgagaccgtgatcgggacagagaaagagaacgcaccagagagagagagagggagcgtgatcacagtcctacaccaagtgttttcaacagcgatgaagaacgatacagatacagggaatatgcagaaagaggttatgagcgtcacagagcaagtcgagaaaaagaagaacgacatagagaaagacgacacagggagaaagaggaaaccagacataagtcttctcgaagtaatagtagacgtcgccatgaaagtgaagaaggagatagtcacaggagacacaaacacaaaaaatctaaaagaagcaaagaaggaaaagaagcgggcagtgagcctgcccctgaacaggagagcaccgaagctacacctgcagaataggcatggttttggccttttgtgtatattagtaccagaagtagatactataaatcttgttatttttctggataatgtttaagaaatttaccttaaatcttgttctgtttgttagtatgaaaagttaactttttttccaaaataaaagagtgaatttttcatgttaagttaaaaatctttgtcttgtactatttcaaaaataaaaagacagcaatgactttatatccaa

SEQ ID NO: 1101 - DNA, 2420 bp, human
ggcagcggtggtgacggcggtgccggaggttgtccttggcaggttttcctcggcgcttctccatggaggaggcggtgcgaacggcttcagccccgaatgctcgcatctcccactggacggcgacgaaggcggtggccgtgcgagcgcaggactgggcggcctgtgtgggggtgtgagccgcggtgcccaaggctgcgccggcgaggggaagccgcgcggccggccggccgactagggctggagctactcggccagggtttaagactttaaatgagaataaagggtggtatttacgaggaaatgagagtgaataagtcatctctaacctctcccagcctttttttcataagagagaccatattaaacttacatgtttgaagactgcttcattctgcctctagtaccagcggtttctctgttctgtgatcaatgtgattcacaggaactccttaagtaacaaacgaaatgagccaggggcgtggaaaatatgacttctatattggtctgggattggctatgagctccagcattttcattggaggaagtttcattttgaaaaaaaagggcctccttcgacttgccaggaaaggctctatgagagcaggtcaaggtggccatgcatatcttaaggaatggttgtggtgggctggactgctgtcaatgggagctggtgaggtggccaacttcgctgcgtatgcgtttgcaccagccactctagtgactccactaggagctctcagcgtgctagtaagtgccattctttcttcatactttctcaatgaaagacttaatcttcatgggaaaattgggtgtttgctaagtattctaggatctacagttatggtcattcatgctccaaaggaagaggagattgagactttaaatgaaatgtctcacaagctaggtgatccaggttttgtggtctttgcaacccttgtggtcattgtggccttgatattaatcttcgtggtgggtcctcgccatggacagacaaacattcttgtgtacataacaatctgctctgtaatcggcgcgttttcagtctcctgtgtgaagggcctgggcattgctatcaaggagctgtttgcagggaagcctgtgctgcggcatcccctggcttggattctgctgctgagcctcatcgtctgtgtgagcacacagattaattacctaaatagggccctggatatattcaacacttccattgtgactccaatatattatgtattctttacaacatcagttttaacttgttcagctattctttttaaggagtggcaagatatgcctgttgacgatgtcattggtactttgagtggcttctttacaatcattgtggggatattcttgttgcatgcctttaaagacgtcagctttagtctagcaagtctgcctgtgtcttttcgaaaagacgagaaagcaatgaatggcaatctctctaatatgtatgaagttcttaataataatgaagaaagcttaacctgtggaatcgaacaacacactggtgaaaatgtctcccgaagaaatggaaatctgacagctttttaagaaaggtgtaattaaaggttaatctgtgattgttatgaagtgaatttgaatatcatcagaatgtgtctgaaaaaacattgtcctcaaataatgttctttaaaggcaatctttttaaagatttcactaatttggaccaagaaattacttttcttgtatttaaacaaacaatggtagctcactaaaatgacctcagcacatgacgatttctattaacattttattgttgtagaagtattttacattttcatcccttctccaaaagccgaatgcactaatgacagttttaagtctatgaaaatgctttattttttcattggtgatgaaagtctgaaatgtgcatttgtcatccccactccatcaatccctgaccatgtaaggcttttttattttaaaaaaacagagttatcccaatacattatcctgtgatttaccttacctacaaaagtggctcctgtttgtttgatgatgattggttttatttttgaaatatttattaagggaaaactaagttactgaatgaaggaacctctttcttacaaaacaaaaaaaagggcagaaatcaccccaaggaacgatttctcaggttgagatgatcaccgtgaatccggcttcctctgagcattcgatggccttagcacctcatcaagccagcacatcctgcctgctgttgcagcctggctgggtttattcttcagttaccctaatcccatgatgcctggaaccttgattaccgttttacatcagctcttgtacttttcagtatattttcataatgagttatattgtcatttagactttgaacagctctgggaaatagaagactagggttgtttcttaaatttagctcatgttataataaaaagttgaaatg

SEQ ID NO: 1102 - DNA, 2717 bp, human
gtcgagagcggtatggggtagaaggcctgttgtggagggaaaccacccatcctcctgcctcccaccaccaccatcatcctggctggacggagagggtgacgggggctgggaaggggcagctcatgttcaggtttccaggaggggctacctgttgactgtctttgcaggaagaagaaaacacctgagtgaccagatgtcccagctccagtgctgtggagcatggtttctgcacacctggaatgactggaaccccaaagactcaagaaggagctaaagatcttgaagtagacatgaataaaacagaagttactcccaggctgtggaccacctgtcgagatggagaagtccttctgaggctatccaaacacggaccaggccatgagaccccgatgaccatccctgaattttttcgagagtcagtcaaccgatttggaacttatccagccctcgcatccaagaatggcaaaaagtgggaaattctgaatttcaaccagtactatgaggcttgtcggaaggctgcaaaatccttgatcaagctgggtttggagcgtttccacggagttggtatcctggggtttaactctgcagagtggtttatcactgctgttggtgccatcctagccgggggtctttgtgttggtatttatgccaccaactctgccgaggcttgtcaatatgtcatcactcatgccaaagtgaacatcttgctggttgagaatgatcaacagttacagaaaatcctttcgattccacagagcagcctagagcccctaaaagcgatcatccagtacagactgccaatgaagaagaacaacaacttgtactcttgggatgatttcatggaacttggcagaagtatccctgacacccaactggagcaggtcatcgagagccagaaggcgaatcaatgcgcagtgctcatctacacttcagggaccacaggcatacccaagggagtgatgctcagtcatgacaacatcacgtggattgcaggagcagtgacaaaggactttaaactgacagacaagcatgagacggtggttagctacctcccactcagccatattgcagcacagatgatggacatctgggtacccataaagattggggcgctcacatactttgctcaagcagatgctctcaagggcaccttggtaagtactctaaaggaggtaaaacctactgtcttcattggagtgcctcaaatttgggagaagatacatgagatggtgaagaaaaatagtgccaagtccatgggcttgaagaagaaggcattcgtgtgggcaagaaacattggcttcaaggtcaactcaaaaaagatgttggggaaatataatactcccgtgagctaccgcatggctaagactctcgtgttcagcaaagtcaagacatcccttggcttggatcactgtcactcttttatcagtgggactgcgcccctcaaccaagagactgccgagttctttctaagcttggacatacctataggcgagttgtatgggttgagtgaaagctcgggaccccacacgatatccaaccagaataactacaggcttctaagctgtggcaagatcttgactgggtgtaagaatatgctgttccagcagaacaaggatggcattggggagatctgcctctggggtaggcacatcttcatgggctatctggaaagtgagactgaaactacagaggccatcgatgatgaaggctggctacactctggggatctgggccagctggacggtctgggtttcctctatgtcaccggccacatcaaagaaatccttatcactgctggtggtgaaaatgtgccccccattcctgttgagaccttggttaagaagaagatccccatcatcagtaacgccatgttagtaggagataaactgaagtttctgagcatgttgctgacgctgaagtgtgagatgaatcagatgagcggagaacctctggacaagctgaactttgaggccatcaacttctgtcgggatctggacagccaggcatccaccgtgactgagattgtgaagcagcaagaccccctggtctacaaggccatccagcaaggcatcaatgctgtgaaccaggaagccatgaacaatgcacagaagattcaaaagtgggtcatcttggagaaggacttttccatctatggtggagagctaggtccaatgatgaaacttaagagacattttgtagcccagaaatacaaaaaacaaattgatcacatgtaccactgactgctttgatggagctgctctcagctgttctgatgccttcagcaggaagacctcattgcaataagtgaaatgctgctctaggtagaagctctccctgctgtttttaagaagccacattcctcattggtcagtttcttgattgttcgtctgttggagaggtgctccctagaagaacctgccatacgtttcaaagcaataaaatcactgtatatctttctaaggaccttcaagtcatgactccagggaagcctattgggaagtctactaaaaactgcctgatttacaagaaagacctgaacttgtgggctcccatttgatttttttctcctcaggggactcagacattagaaagaaaaagcctcacagatttgaagaactggacccccaaatcaactcacctgcctggaagcaactgggaaacccttccaataagtcctgataataaagcacttcagggtcccaaaaaaaaaaaaaaaa

SEQ ID NO: 1103 - DNA, 3692 bp, human
ctgatttctcttcggctggacggaggctgcctcctcacgcggctcccaactattcccgtagctcagtgcccccctcccgccgctctactcagccaggcagacagactgacagactcgctagtcggcagcttcactcccgagggtgccgcgagcccaggcggcgaacacccggtacccctggcgcagcgaggtgggatgctgtacggacagcagcgctaagtgcccccccacccccggcgcagggtgcactcgctcctggccgcgggcccagcggcggcggcggcggcggcggcggaggggatgagcccgggacgcgcgaggcgcctgcctcaagctaccgcccggagagggacgccgagtagggctcatcgcagtaccgcgcggacccctgccccctgtggcacgcggctgcggagccttgaagccgtgtctgtgatcaggatgcactgggcgcctcgcagctggtgaggatgccctgctgcgcggccctgcgcccccagccccagtcccaggtgggcaagactgactgggcccggcttcggcccctcgtgccggtggatgaaacgtgccggagtgcttgggtgccatcagctatcaaatctgaattctaagcgccatggacgaaggcactggactgcagcccggggcgggagagcagctggaggcgccggccactgcagaagctgtccaagagaggtgcgagccggagaccctcaggtctaagagtttaccggtcctcagcagcgcctcctgccggccaagcctcagtcccactagtggagacgccaacccggcctttggctgtgtggattcttcgggccaccaggagttgaagcaaggcccgaacccgttggcccccagtccctctgccccgtccacttcggcggggctcggggactgtaaccacagggtggacctcagcaaaaccttctcggtgtcctccgccttggccatgctccaggagagaaggtgcctctacgtggtcctcacggattcccgttgcttcctggtgtgcatgtgctttctgaccttcatccaggcgttaatggtctctgggtacctgagcagcgtaattaccaccattgaaaggcgctacagtctgaagagttccgagtcggggctgctggtcagctgctttgacatcgggaacctggtggtggtggtgttcgtcagctacttcggcggccggggtcggcggcccctgtggctggccgtgggtggactcctcatcgccttcggggcagccctcttcgccttacctcacttcatctcgcccccctaccagatccaagagttgaacgcctcggcccccaacgacggcctgtgtcagggtggcaactccaccgccactttggagcctccggcctgtccgaaggactcgggaggaaataatcactgggtctacctggctttattcatttgcgcgcagattctcattggaatgggctccacacctatttataccctgggaccaacctacttagatgacaatgtcaagaaagaaaactcctccttgtacctagccatcatgtatgtcatgggagcacttggccctgcagtgggatatttattaggtggacttcttattggtttttatgttgatcccagaaatcctgttcaccttgaccagaatgaccctcgtttcattggaaactggtggagtggattcctcctttgtgccattgcaatgtttcttgtgatattcccaatgtttactttcccaaaaaagcttccacctcgacacaagaaaaagaaaaagaaaaaattttctgttgatgctgttagtgatgacgatgttctgaaggagaaatcaaacaacagtgaacaagcggacaaaaaagtttcttcgatgggatttggaaaggatgtcagagacctaccaagagcagctgtcaggatcttaagcaacatgacattcctttttgtgagtttgtcatacacagctgagagtgccattgtaactgctttcattaccttcattcccaagttcatcgagtcacagtttggtatcccagcctccaatgccagcatctacactggggttattatcgtccccagtgctggtgttggtattgtcctcggaggctacattataaaaaaattgaaacttggtgccagagaatctgcaaaactagcaatgatctgcagtggtgtgtctttactatgtttttcaaccctatttattgttggatgtgaaagcattaatctagggggcataaacatcccttatacaacaggaccttctctcaccatgccccataggaatctgacaggaagctgcaacgttaattgtggttgtaaaatacacgagtatgagccagtctgtggatcagatggaattacatactttaacccttgtctggctggctgtgttaatagtggtaatcttagcactgggatacggaattatacagaatgcacctgtgtccaaagtcgccaagtgatcactccacccaccgtgggacagcgaagtcagctccgtgtggttattgtcaagacttatctcaatgagaacggctatgctgtgtctgggaaatgtaaacggacctgcaatactcttatcccattcttagtttttcttttcatagtcaccttcatcacagcatgtgcccaaccatcagctatcatagtaacactcaggtccgtagaagatgaggagagaccttttgcactgggaatgcagtttgttttgttgcgaacacttgcatacattcctactccaatctactttggagcagtcattgacaccacctgcatgctctggcaacaggaatgtggtgtgcagggttcttgctgggagtacaacgtgacgtcgtttcgttttgtgtattttggtttggctgccggcctcaaattcgttgggtttatttttatttttctggcctggtactccataaaatacaaggaggatggactgcagaggcggaggcagagagaatttcccctgagcaccgtgagtgagagagtgggacaccccgacaatgcccggactagatcttgcccagctttcagcacccagggagaattccacgaagagactggcctgcaaaaagggatccagtgcgcagcacagacctacccggggcccttcccagaagcaataagttcctctgcggacccggggctggaagagagccccgctgccttggagccgccctcctgaagcttgaaaatggaagaatttagttttgttggttgaattgaaaatggcgacttgagaaacaactgtgccttcttttctttctttcttttttttaacctctacagacacaatcctcaaaccaacaaaactcagtatacacagccgctattcattgagggctggatacctcaacaagactgagagcctttccccgcttctctccaagaaggagacgttcagctagatttgttcccatttccgttgtgttaattcaaagctcatgctcccctacggtacaggctgaggtacacggttagcaaaaccatgggaaggggaatggcggtgcatatcattaactaacactccaaacaaaggtgagcttgcccaggacttggcatttccaaatcaaagtttttagatatgaacacctactgtgagttctgctacaaagcacaaatgaatttgtctcaactatgcaatttgattggaaaaatgtatgtgcagcatgttacatttactttcacggaataaagcagatatgtttctgaaa

SEQ ID NO: 1104 - DNA, 999 bp, human
tttttttggcggtataaaagtgcttctttatttggtcatacagctttcaaatgttgcttaacgaacagatagcatttttataatcagaggaaagactcagtattaaagtgcgcgtcccatcattgcaaccgggccctcgggcagccagctctctcttgcttcgcgtccggctctcaggccctggagctcggcctccctaccttctccaggcgcgggtcctgctccttttccggccgcccttcctcagcccccggctcggacactctgcaggagaccaagagaagggggaaatggggctgggggccgtccccgggagacaggcggccttccgagagggactggagcaggccgtgcggtatgccaaagccctgggctgtcccaggatccacctgatggctggccgagtaccccagggagctgatcgaatagcagtcaaggctgagatggaggccgtttttctggagaacctgaggcatgcagctggggttttggctcaggaggacctcgtgggactgctggagcccatcaacacccgcatcactgacccccagtacttcctggacacgccccagcaggcggcagccatcttacagaaggtaggaagacccaacctccaattacaaatggacatattccactggcagatcatggatgggaacctgacaggaaacatccgggagttcctgcccattgttgggcatgtgcaggtggcacaggtcccaggccgaggggagcccagcagccccggagagctgaatttcccctatctgtttcaactgctggaagatgaaggctacaaaggcttcgtgggctgtgagtatcagcctcgaggagacacagtagagggcttgagttggctacgttcatactgggataggcggggccacccagaggctggccagtgagggcccgcacaccacccacgtgcctccagacagcgagtgacatcccatctcctcctctgcattaaagatgacctgctgaaaaaaaaaaaaaaaa

SEQ ID NO: 1105 - DNA, 1706 bp, human
cacttgatgggaatcatggcagcatccaggccattgtcccgcttctgggagtggggaaagaacatcgtctgcgtggggaggaactacgcggaccacgtcagggagatgcgcagcgcggtgttgagcgagcccgtgctgttcctgaagccgtccacggcctacgcgcccgagggctcgcccatcctcatgcccgcgtacactcgcaacctgcaccacgagctggagctgggcgtggtgatgggcaagcgctgccgcgcagtccccgaggctgcggccatggactacgtgggcggctatgccctgtgcctggatatgaccgcccgggacgtgcaggacgagtgcaagaagaaggggctgccctggactctggcgaagagcttcacggcgtcctgcccggtcagcgcgttcgtgcccaaggagaagatccctgaccctcacaagctgaagctctggctcaaggtcaacggcgaactcagacaggagggtgagacatcctccatgattttttccatcccctacatcatcagctatgtttctaagatcataaccttggaagaaggagatattatcttgactgggacgccaaagggagttggaccggttaaagaaaacgatgagatcgaggctggcatacacgggctggtcagtatgacatttaaagtggaaaagccagaatattgagttatttcttaacaagtttcgagagagaagggagcaagacaagagcaagcaacggctattaaatgtcacaatcctttaattagaaaccatttattggccggacgcggtggctcacgcctgtaatcgcagcactttgggaggccgaggcgggcggctcacgacgtcaggagatccagaccatcttggctaacagggtgaaaccccgtctctactaaaaatacaaaaaattagccgggcgtggtggcgggcgcctgtagtcccagctactctggaggctgaggcaggagaatcaattgaacccgggaggcggagcttacagtgagctgagattgcgccactgtactcctgggcaacagcgagactccgtctcaaaaaaaaaaaaaaaaaaaagaaaccatttattttaaaaatgattagattgctatgcctcaactcatagaagatgaacccttcaagaaaacgtgaagtagaacgggtgggccagaaatgaaaacaggcaagtaaagtatttcttcggaaaacattttatcaaaccaaatgttaaaaagactttccttttgtaaaactggattagagaagacttttcagtgggttatctctaggatgatcagtagttcagcacttaaaaactgcagagaaaactgaaagttatgttccagataactttccgttgtttaccaaattttcttagatttggtcatcatcaggaagcatttgtaaaaataaaaatctccacaaattactggcccatctcggacttgctgaatcaatttgataggattaatctccagtgaagctgtgtttacagggcattccaagtgattcttatcaggaaatgtgaaaaacactcctgtacataatcggttaatttaaaattttacttaataagtgaacaagtaatgaagatttcacctgtttacttagggtatctacccagacccatcgattctgagttcgggagatgattttgaaattactgttttccaaataaaggtgctcccttccaaaaaaaaaaaaaaaaaaaa

SEQ ID NO: 1106 - DNA, 1191 bp, human
gggccctagcaaccagagcagtgacagtagcaaccgccggaatggcgaaagcaacaacaatcaaagaagccttagcgagatgggaagagaaaactggccagaggccatctgaagccaaagagataaaactttatgcccagattccccctatagagaagatggatgcatccttgtccatgcttgctaattgcgagaagctttcactgtctacaaactgcattgaaaaaattgccaacctgaatggcttaaaaaacttgaggatattatctttaggaagaaacaacataaagaacttaaatggactggaggcagtaggggacacattagaagaactgtggatctcctacaattttattgagaagttgaaagggatccacataatgaagaaattgaagattctctacatgtctaataacctggtaaaagactgggctgagtttgtgaagctggcagaactgccatgcctcgaagacctggtgtttgtaggcaatcccttggaagagaaacattctgctgagaataactggattgaagaagcaaccaagagagtgcccaaactgaaaaagctggatggtactccagtaattaaaggggatgaggaagaagacaactaatgccacgctttccactgtgtgttaacttatttaaatgtcataagaacaatagataaattttatataattgtctattttaaagattctgtatgggacaaaagtttcttaagataaaacagatcactcattctcatctttttttttcctttaacttattcagtgtttctccccaaaactggtaatgccaaccttatatatcgtatttctctttttagaaaccacaaattttcgatttttgtcttcagtctcagttacgtactgtgtagccccatctactaaaacaaaacctttgtagaccagtcatttttaataacaaaggaacaaatgtttttttcagtttgttcatttttttttaggttagacattttaaaagatgtacatttgaaaattcagaacatttttcctgaaggtctgtctctgtacaattcagaagcacatgcctttagctcagaaggcagcatggtgatgggaagagttcctcttagaaatacagcaggtccggaaccaagactccaaagttccattggaaaagatatggtgaaaaaaggaaaaaaaaaaaaaaaaaaaaaaaaaaaaa

SEQ ID NO: 1107 - DNA, 506 bp, human
cagccctgacgcttccttggggccacttccttctttttttcctagcaacggcgggtagcgtttttgacatcccgggaggctgtgccgccggcctgagcccagagtttcgcggcctccgcgatggcagaggtggaggaaaccttaaagaggatccagagtcataaaggggttattggaactatggttgtaaatgcagaaggtattcccatccgaacaaccttggacaactcaacaactgttcaatatgcaggccttcttcatcacctgacaatgaaagccaaaagcacagttcgtgatattgatcctcagaacgacctgacttttcttaggatcagatcaaagaaacatgaaatcatggtagctccagataaggaatatcttctgatcgtcattcagaatccatgtgaatagacctgcgatggccaaggctgtttaagcgacactgggttggaaacacttggctctctcatgagtattaaaattctatttcaatctaaaaaaaaaaa

SEQ ID NO: 1108 - DNA, 1661 bp, human
cggcctccctgccccttcacggcccgcctgcctccctgcccaagtcctgagccaccatgctgaccccgatggtggccgggggggtggtgttccccggactcttcctcctctccaagaacacgctccagcggctgccccagctacgctgggaggaggccgacgcagtcattgtctcagccaggctggtgtcctctgtccaggccatcatggcctccactgccggctacatcgtctccacctcctgcaagcacatcattgatgaccaacactggctgtcctctgcctacacgcaatttgctgtgccctacttcatctacgacatctacgccatgttcctctgtcactggcacaagcaccaggtcaaagggcatggaggggacgacggagcggccagagccccgggcagcacgtgggccatagcgcgtggctacctgcacaaggagttcctcatggtgctccaccatgccgccatggtgctggtgtgcttcccactctcagtggtgtggcgacagggtaagggagacttctttctgggttgcatgttgatggcagaggtcagcacgcccttcgtctgccttggcaagatcctcatccagtacaagcagcagcacacactgctgcacaaggtgaacggggccctgatgctgctcagcttcctctgctgccgggtgctgctctttccctacctgtactgggcctacgggcgccatgccggcctgcccctgctggccgtgcccctggccatccctgcccacgtcaacctgggcgctgcgctgctcctggcccctcagctctactggttcttcctcatctgccgtggggcctgccgcctcttctggccccgctcccggccgcccccggcctgccaggcccaggactgaggccgggggccgggaccctccccctccccacccccacccccgtggagacagggctctggggctgatggctggggttgggagccagggtcctcttgcccggacaaccccaggactgacgatgaccccgaaagggaagaggccccatctctcggggactgagggggtggagagaggggacctcttccccctactctgcccccttcctgcacacccttgcgctggaggaggggagggggcaccgcctcccacccactgagggcaggagggcttgtggggagggacaccaacagggtttcaaggggaccaggagtcagaatgtggggagacgcctctgccaaggccatcccagcccctatgctgccatcccccagggctccccatcacccgagaggagaggacgccccaactaacccccgctggccctcgggcctcccgagtggccggctgcaaccacggctcctctccagggtaggccagcttgaggaatcttatttattttatttatttacccaaatttgaactagtctgttgggttgggggaaggaggtggctgctacccccaagccttcccagtgctgacaaccccgggggcaggcgagggcgcccagtccctcaccatcggctgcacatcgcgccctcgggccctgccatgtccctggtgctactgacctctcaaggcttcctccaatctggggtcgggggaccctgggaggtgctttacagaccgctaataaaagacgatctgcgtgaacgccaaaaaaaaaaaaaaaaaaaaaaaaa

SEQ ID NO: 1109 - DNA, 2087 bp, human
ctggatttggacttcattctggacagcatatgacaaggacgaggacccctattctagccagttaaagctggacagaatttttaaaagcaatgaagccagttccttggatatatccacgggctttgctttgagaaggaactgagtaggcagtgagaagagtcgagtgaagcctggcccgtgagtgcctcaacaactgagatgaacgtcgactcgcttgcaggcaagttgtcactcagcagcgatctgaactatatcctgggttccagaaaaggcagaggttcttaccgaaagcaggggaggaagccgcagcccaaggaggtcgtcacttgccgggaaggtggctcgggccaggctgcactcaaaacccgtgctctgtccacactgctacggggccagagccaaggaagcttccacttcttcccccagacagccccaacagcggctaccccaaggagccagcagccttgtgtcctgggatccccagcccctgcagaatgacccaccaggatctgagcatcacagccaaactcatcaatggaggtgtagcagggctcgtgggggtgacctgcgtgttccccatcgacttggccaagactcgcctgcagaaccagcatgggaaagccatgtacaaaggaatgatcgactgcctgatgaagacggctcgggcggagggcttcttcggcatgtaccgaggggctgcagtgaacctcactctggtcactccagagaaggccatcaagctggcggccaacgactttttccggcggctgctcatggaagatgggatgcagcggaacctgaagatggagatgcttgccgggtgtggggctgggatgtgccaggtcgtggtgacctgtcccatggaaatgctcaagattcagctgcaggatgctggacgcctggccgtccatcatcagggctcggcctcagcaccctccacctccaggtcctacacaactggttcggcttccacccacaggcgcccctctgccaccctcattgcctgggagctgctccgcactcagggcctggctgggctctacaggggcctgggtgccactctcctcagagacattcctttctccatcatctacttcccactgtttgccaaccttaacaacctggggttcaacgagctcgccggtaaggcgtcctttgcacattccttcgtgtcaggctgtgtggcaggttccatagctgcggtcgcagtgacgcctctagatgttctgaaaactcgaatccaaaccctcaagaaaggcctgggcgaggacatgtacagtgggatcaccgactgtgccaggaaactctggattcaggagggaccatctgccttcatgaaaggcgctggctgccgggcactggtcatagcacctctctttgggattgctcaaggggtctattttattgggattggagagcgcatcttaaagtgttttgactagacagagctggaggtcaagtccctgcgcttgccgccctctctctagctgtttcacttagcctagagggggcaagggcaggtggggccactctggcctgcctggtcctctgcgttgtagtgctacctcaatctcgggagaaacagccctatattctaacaagttgagcacagccttcttccccttcgtgtctacactcgttttcctttgtgggcacagctaccaggggcttttggaagcccctaaccacctacttttcaacaaaaatggtactttcgttgtattaattgcaggaccttaacaggtagtcacaatagaagggttgtttctgtattttaacatttctatttcacagtcaaactcggcattcttcagtcagcttgaggatttagcattgttaatcttggactccataacttatgagtcctagcactgattttgaggaaaaggaggatcagaagttcaagggaccgtgaaagccctcagagtcagcacctagtttgagaccaagcaccctttcgaatccctggatggctgagggggctgaggccggctctgactgggcagcccagcccctcccccagagcccaggctcttgcacacccctccctgtaaccaaggaacactctgaaataaaggtgaatggct

SEQ ID NO: 1110 - DNA, 2200 bp, human
ggctgccaggggcgtgttatcgcgggggcagcctgggagcgctgctgcgccgcggcaggagaaacagccgaggacaccctggaagagcaggagcacgtgggcctgcgagaatggcgccaacaccagccctgcaaagccacattccaaagccgggccaaggacagccaccgttgccccgcaggcctcaaggatgacggtcaagccagccaaggccgcctccctagccaggaacctcgcaaagcgcaggcgcacctacctgggtggcgcggctgggcggagtcaagagccggaagtcccttgtgccgcagtccttcccgggaaacctggggaccggaactgcccggagttcccgcccccagacagaaccctgggttgctgggcaaccgatgcggcccccgcagctggtctctgtggtgctgggagcgagcccagtatagctcccacctcctgcgctggtaacctcccgtcccgcccgcctcccttgttgtcgcctctcctcgcgtcgcggaatccttgcccttggcactacttacatctctccgggtcccacaacaccttagcgcccacctgcttcaaagccaagctccaccgaaagcgaggcagtcagcccccggacatggcctcagcgctgactgatcgcacctctcgggccccgagcacctacacctacaccagccggccccgagcactgccctgccagcgcagccgttaccgggacagcctgacgcagccagatgaagaacctatgcattatggaaacataatgtatgacagaagggtaattcgaggtaacacttatgcactccagacagggccactgctcggacggcctgattctctagagctccagagacaacgggaggctaggaagagggctcttgccagaaaacaagcccaagagcagctcagaccacaaacacctgaacctgtggaaggcagaaagcatgtcgatgtgcaaacagaattataccttgaagaaattgctgatcgcataatagaagttgatatggaatgccaaacagatgcatttttggacagaccaccaacaccactctttattcctgccaaaactggcaaagatgtggccacccaaatactagaaggagagctctttgactttgatcttgaagttaaaccagtgttagaagttttggtggggaagacaattgagcagtctcttctggaagtaatggaagaagaagagctggctaacctgcgggccagtcagcgtgagtatgaagaactacggaatagtgaacgtgctgaagttcaacgacttgaagagcaagagaggcgacaccgagaagaaaaagaacggcgtaagaaacagcagtgggaaataatgcacaagcacaacgagacatcacaaaaaatcgccgcccgagcatttgcacagcgttacctggctgaccttctcccgtctgtttttggcagcctcagggatagtggctacttttatgatcccattgaaagagatattgagataggatttcttccatggctaatgaatgaagttgaaaaaaccatggaatatagcatggtgggaagaacagtgcttgacatgttgatccgtgaggtggttgaaaagaggctgtgtatgtatgagcatggggaagacacacatcagtctccagaacccgaggatgagcctggtggtcctggagcaatgacagagtcactggaggcctctgaattcctggagcagagcatgtcacagacacgggagctgcttttagatggaggctacctacaaagaacaacatatgacagaaggtcatcccaggaaaggaagtttatggaagagagagaactcttagggcaagatgaagaaacagcaatgaggaagtccttaggggaggaagaattgtcataggagggaagcttcaaagtcatgaaaccaatcaacagccaagtcagcaagcaatcaggtaatgatgtgcgagtcccctcaggttatagaaattatgttgtatttagtcagtatgtctttttgtgtaatggactgggccaatcaaatgtgataaaattaatttgagaatgaaacttaaattgaattcatttatttaatagaatattcaaaggctatattgtaattctaatgagaattatatttaattactagcttctattaccattatatgtaaccagcaaatatatttttccttagcccttctaaaaaaaaaaaaaaaaaaaaaaaaaa

SEQ ID NO: 1111 - DNA, 1973 bp, human
gctcaggcggcgggcgcggctaggatggcgaagagcaacggagagaatgggccgcgcgcgcccgcggccggggaaagcctgtcgggaacccgggagagcctggcccagggccccgacgccgcaaccaccgacgaactcagctctctcgggtctgactcggaggccaacggcttcgccgagcgccgcatcgacaagttcggcttcatcgtgggctcgcagggcgccgagggcgcgctggaggaagtacccctggaggtgctgaggcagagggagtccaagtggctggacatgctcaacaactgggacaaatggatggccaagaagcacaaaaagattcgtctgcggtgccaaaagggcatcccgccttctctgcggggccgtgcttggcagtacctgtcaggaggcaaggtgaagttacagcagaaccctggaaagtttgacgagctggacatgtcccctggggaccccaagtggctggacgtgattgagcgtgacctgcaccggcagttcccattccatgagatgtttgtgtcccgggggggccacggccagcaggacctattccgtgtgctgaaggcctacacgctgtaccggcccgaggagggctactgccaggcccaggcgcccattgccgctgtcttgctcatgcatatgcctgctgagcaagccttctggtgcctggtacagatctgtgagaagtacctgcccggctactacagcgagaaactggaggcgatccagctggacggggagatccttttctcgctgttgcagaaggtgtcgccggtggcccacaagcacctcagccgtcagaagatcgacccgctcctctatatgacagaatggttcatgtgcgccttctcccgaaccttgccctggagctctgtgctgcgtgtctgggacatgttcttctgtgaaggggtcaagatcatcttccgggtggggctggtgctgctgaagcacgcgctgggctcccctgagaaggtcaaagcctgccagggccagtacgagaccatcgagcgactgcggagcctcagccccaagatcatgcaggaggcctttctggtccaggaggtagtggagttgcccgtgacagagcgccagattgagcgcgaacacctcattcagctgcggcgctggcaggagacccggggtgagctgcagtgccgctccccgcccaggctgcatggtgccaaggctatcttggatgcagaacctggtccccggcctgccctacaaccttcaccatccatccgcctgcccctagatgcccccctccctggctccaaagccaagcccaagccacccaagcaggcccagaaggagcagcggaaacagatgaaggggagagggcagctggagaagcccccagccccaaatcaagccatggtggtggccgctgcaggagatgcatgtcccccacagcatgtgcccccgaaggactcagcccccaaggactcagcccctcaggatttggctccccaggtctcagcccaccaccgctcccaggagagcttgacgtcccaagagagtgaggacacctacttgtaaccctggcagctaaggcctccagggcggggtctccatataactacacggttcatgaactgacattccacatcctgcccaccctctgagggccaagctgcctggccactgggctgggctggagtctggctggtccaacacagattctgcctggtccaacacagattctgcctgagcctccttatttattttctttacagtggcactcaggctggcccagccagggcaggcagaagctagggcctggggggtggggcctccttcagccccctcctcctgggggatgctccccagggttagggtgctggtgtgaggggaaagggtggggtgttctttgtgtaaaatagaaacatggttttgtacagaaataaacagccttgtatagagaaaaaaaaaaaaaaaaaaaaaaaaaaaaaaaaaaaaaa

SEQ ID NO: 1112 - DNA, 1628 bp, human
ctggggttgtggttgaggccgggtctccgctcctgtgcccgggaagatggtgctaggtggttgcccggttagttacttacttctgtgcggccaggcggctttgctgctggggaatttacttctgctgcattgtgtgtctcggagccactcgcaaaatgcgaccgctgagcctgagctcacatccgctggcgccgcccagccggagggccccgggggtgctgcgagctgggaatatggcgacccccactctccggtcatcctctgctcttacctaatcacgccattttttaacatctctttttgatcaaacaagaaaaggcatttgggaaatgcaaagaggactgagaatactttggcttaaattttgcccccagaatcttgttgtttgcctactgaagagatgaaaccatggcagaagtagaatccttatagaaacaggaccagaaacacctcccttctccaacaaaaggttcattttggtggctgtccgtttgacctgctgtgcttcagtttaattggcttggaaaggggtcagcagggtgaaaccgaaccccagaaaacttgatgaagaaatgtcttttgcccgttttgattacgtgcatgcaaacagcgatttgcaaagaccgtatgatgatgatcatgatcttactggtgaattacagacctgatgaatttatagaatgtgaagacccagtggatcatgttggaaatgcaactgcatcccaggaacttggttatggttgtctcaagttcggcggtcaggcctacagcgacgtggaacacacttcagtccagtgccatgccttagatggaattgagtgtgccagtcctaggacctttctacgagaaaataaaccttgtataaagtataccggacactacttcataaccactttactctactccttcttcctgggatgttttggtgtggatcgattctgtttgggacacactggcactgcagtagggaagctgttgacgcttggaggacttgggatttggtggtttgttgaccttattttgctaattactggagggctgatgccaagtgatggcagcaactggtgcactgtttactaaaaagagctgccatcatggcccagggaggcgggtgaaagctccgtcttctgaattcatctctacaggctcaaaactcctctttgatatcagacctgatgttattttccttcttttggagggcatttgtttggttaagaaggcttctttggactttggaatttcaacccagattttaccttgcagacggaatgacaagcaaaaagtgttgtggggaatcaaatttgttcctttcctcatgcacaaaacataaaggatagtggcgagtttacaagctgtggatgggtttccatagtcttcctttctgtacattgctatatcttcagtcctttggagcaagtggacctaacaagttgagcaaaatgaatatttggatccatgttcctcttgtgaccctgagtcttcatgcaaggagatctgaagctgaacaatgaaaatcttcagcagaaatagaaatggccgtggattgtaatacacactgaaattctgactttctgaatttaaatgtagaataaattttaccaacttggaaaaaaaaaaaaaaaaaaaaa

SEQ ID NO: 1113 - DNA, 2179 bp, human
gcatgaggagagtgtgtaggggccgggttccgtggatgaactctcacccgagcggtttctctttccgggacaacatggcgccgtccacgccgctcttgacagtccgaggatcagaaggactgtacatggtgaatggaccaccacattttacagaaagcacagtgtttccaagggaatctgggaagaattgcaaagtctgtatctttagtaaggatgggaccttgtttgcctggggcaatggagaaaaagtaaatattatcagtgtcactaacaagggactactgcactccttcgatcttctgaaggcagtttgccttgaattctcacccaaaaatactgtcctggcaacgtggcagccttacagtacttctaaagatggcacagctgggatacccaacctacaactttatgatgtgaaaactgggacatgtttgaaatctttcatccagaaaaaaatgcaaaattggtgtccatcctggtcagaagatgaaactctttgtgcccgcaatgttaacaatgaagttcacttctttgaaaacaacaattttaacacaattgcaaataaattgcatttgcaaaaaattaatgattttgtattatcacctggaccccaaccatacaaggtggctgtctatgttccaggaagtaaaggtgcaccttcatttgttagattatatcagtaccccaactttgctggacctcatgcagctttagctaataaaagtttctttaaggcagataaagttacaatgctgtggaataaaaaagctactgctgtgttggtaatagctagcacagatgttgacaagacaggagcttcctactatggagaacaaactctacactacattgcaacaaatggagaaagtgctgtagtgcaattaccaaaaaatggccccatttatgatgtagtttggaattctagttctactgagttttgtgctgtatatgggtttatgcctgccaaagcgacaattttcaacttgaaatgtgatcctgtatttgactttggaactggtcctcgtaatgcagcctactatagccctcatggacatatattagtattagctggatttggaaatctgaggggacaaatggaagtgtgggatgtgaaaaactacaaacttatttctaaaccggtggcttctgattctacatattttgcttggtgcccggatggtgagcatattttaacagctacatgtgctcccaggttacgggttaataatggatacaaaatttggcattatactggctctatcttgcacaagtatgatgtgccatcaaatgcagaattatggcaggtttcttggcagccatttttggatggaatatttccagcaaaaacaataacttaccaagcagttccaagtgaagtacccaatgaggaacctaaagttgcaacagcttatagacccccagctttaagaaataaaccaatcaccaattccaaattgcatgaagaggaaccacctcagaatatgaaaccacaatcaggaaacgataagccattatcaaaaacagctcttaaaaatcaaaggaagcatgaagctaagaaagctgcaaagcaggaagcaagaagtgacaagagtccagatttggcacctactcctgccccacagagcacaccacgaaacactgtctctcagtcaatttctggggaccctgagatagacaaaaaaatcaagaacctaaagaagaaactgaaagcaatcgaacaactgaaagaacaagcagcaactggaaaacagctagaaaaaaatcagttggagaaaattcagaaagaaacagcccttctccaggagctggaagatttggaattgggtatttaaagattcacggaaagcaagttgatgaccagaaatcagtgcaaacacatcttctgttaaacccattggtatacacagaatattcctgtgcccacacttaatgtcaatctataattttaaccatttatccaagattctactaagtgtaaaattatttaataatgtctattaaattgatatttatatcttgcatcctatatcatgtcaatatgtgatatagaaaagagatacgtgaattttttagctaagcttgacagattgaaagacaagtgtcatttttttttgtagagggtgatatataccatgtaaatgaataaagacattttaaatttaaaaaaaaaaaaaaaaaa

SEQ ID NO: 1114 - DNA, 2012 bp, human
agggggcaggaacagcaggcctggccagcccaaaggactctctatccaggatgtaaatgagcacactgctggcccatgcgcctcggggctgtagagggcagcctcagaggcactgggcattcctggcaccatggatgacgctgctgtcctcaagcgacgaggctacctcctggggataaatttaggagagggctcctatgcaaaagtaaaatctgcttactctgagcgcctgaagttcaatgtggcgatcaagatcatcgaccgcaagaaggcccccgcagacttcttggagaaattccttccccgggaaattgagattctggccatgttaaaccactgctccatcattaagacctacgagatctttgagacatcacatggcaaggtctacatcgtcatggagctcgcggtccagggcgacctcctcgagttaatcaaaacccggggagccctgcatgaggacgaagctcgcaagaagttccaccagctttccttggccatcaagtactgccacgacctggacgtcgtccaccgggacctcaagtgtgacaaccttctccttgacaaggacttcaacatcaagctgtccgacttcagcttctccaagcgctgcctgcgggatgacagtggtcgaatggcattaagcaagaccttctgtgggtcaccagcgtatgcggccccagaggtgctgcagggcattccctaccagcccaaggtgtacgacatctggagcctaggcgtgatcctctacatcatggtctgcggctccatgccctacgacgactccaacatcaagaagatgctgcgtatccagaaggagcaccgcgtcaacttcccacgctccaagcacctgacaggcgagtgcaaggacctcatctaccacatgctgcagcccgacgtcaaccggcggctccacatcgacgagatcctcagccactgctggatgcagcccaaggcacggggatctccctctgtggccatcaacaaggagggggagagttcccggggaactgaacccttgtggacccccgaacctggctctgacaagaagtctgccaccaagctggagcctgagggagaggcacagccccaggcacagcctgagacaaaacccgaggggacagcaatgcaaatgtccaggcagtcggagatcctgggtttccccagcaagccgtcgactatggagacagaggaagggcccccccaacagcctccagagacgcgggcacagtgagcttcttgcggcccagggaatgagatggagctcacggcttaaagcccaagctctgaagaagtcaagggtggagccagagaaggaaggcagtcccagatgagcctctattttcatcagcttcttctctctccccttgaacttggtaacccacatggttctcccgtggcccctaggtggatgaggccaaagtcaaatccaaggctgagacagtcgtgcgactcctactcccccagagcgtgacccggagcaggtgctggacacagagcctgtctcagcagagggtccccactggccgcaacggctcagtgacagcaagagcaggaagagcagcaggaaggcaccgctgtccaccttgggcaccatttatcctcctttcatcgtccccggggcagttgcgtgaccctgctgggaggccagaccaggccagactgagggtcaggggaccaggctgggttgggggttgggtggggctggacggggacgaggcgcggagaggaggcgggaaagagcttcggctgggccacgggctcgcgggcactctcggcggcagcctcgggggctccgactccagctctgggcaagatccataaacttttaaagaagcctcaaaacatacttttaaagcattaagctttaaagtgctagaaatcttgtgccccatatgtgcttctttcagtattatcctagatcctcaggagtagcatggcaactggagaaaatgggaggaaagacaagaagaaatagaagctgatttaacaccaaaaaaaaaaaaaaaaaa

SEQ ID NO: 1115 - DNA, 2261 bp, human
aacttccggcgtccgtcgggcagcagcggggctgtctatcccggctgaggacccgcggccagtgcgggtggctggctttgccattagcgggggcctttcctgaggacggcgtacggagtgtggggaatgaaggatggcagcatgccgtgcattaaaagctgttttggtagatctcagtggcacacttcacattgaagatgcagctgtgccaggcgcacaggaagctcttaaaaggttacgtggtgcttctgtaatcattaggtttgtgaccaatacaaccaaagagagcaagcaagacctgttagaaaggttgagaaaattggaatttgatatctctgaagatgaaatattcacatctctgactgcagccagaagtttactagagcggaaacaagtcagacccatgctgctagttgatgatcgggcactacctgatttcaaaggaatacaaacaagtgatcctaatgctgtggtcatgggattggcaccagaacattttcattatcaaattctgaatcaagcattccggttactcctggatggagcacctctgatagcaatccacaaagccaggtattacaagaggaaagatggcttagccctggggcctggaccatttgtgactgctttagagtatgccacagataccaaagccacagtcgtggggaaaccagagaagacgttctttttggaagcattgcggggcactggctgtgaacctgaggaggctgtcatgataggagatgattgcagggatgatgttggtggggctcaagatgtcggcatgctgggcatcttagtaaagactgggaaatatcgagcatcagatgaagaaaaaattaatccacctccttacttaacttgtgagagtttccctcatgctgtggaccacattctgcagcacctattgtgaagcaatgtgtgcatctgaagcaacttgaaatgcagcttcttattgtctggaatgaatcccttaccaactcagtgccagcatcggtagacaccagtcagtgctgatcgctttttaaccctcttttgttgtgcattaattagaaagaaaggtattgaattgcggctagccagtaagccttgctaatctcttttattttgtaactgaagatgagacccaaagaaagggaaagctgagattttgtgccattccttttaaaatattcatcaggttaggtggggctgtgggggaaaagctactacagggaagagtgttctctgctgtctcttcactggaaaacagggaggggggatttcagactgtgaagaaagttgaatggtggtttttaaattataaagtaatgtattaaaaggtgcattaggctgtagttctaatattgagttcaactgtgaaatccatcagatgtgccaaatggagaagacagaaagcaacaaagtgaattgttctttagcccaagtggtacagtgaatttgctttaacagatgttgaaaactaaattttctactgtattcccagcacgggtgacttctttttctcttcattagccagagatgactaatttaaatttagaaccagattttaatttaaattaatatttccattaataacctattcattgcagatacctattatactgtgtaacagttgttttggaaattttatgtaaaattaaaactatcagtattttacagatgttttaattagacattgttattaacaggaacagtgcagaaactagaatcaagccttataatatcttatagaccatgcatttttgaagttagtgtccactagggtcctattaactgtacatttgcaagatttcattatttttgcctctgacactatgggaaaaattttttagaagctattgggacagattcaagcttttatgcacttggttactacagctgtaaaatgaaatctcgtcttgtagcatggattattcttctcatgttaaacccaccaaaataaaggggactaaataggtaatgattttcctagtgcatttgcatactgtgataatcctgggccttgcaatagttctacagggctcttgggcattgaattattaggatgtaattgtacatcattgtagtgttcaccttattgaagctcactctgatgttaatgagcttcgggttttgatgcttgtttagagatcagcagtcttggatgggagggaacaaagctaaataaatgttagtttggtgaaaaaaaaaaaaaaaaaaaaaaaaaaaaaaaaaaaaaaaaaaaaaaaaaaaaaaaaaaaaagaaaaaaaaaaaaaaa

SEQ ID NO: 1116 - DNA, 3433 bp, human
ggcgcggctggtgcgctcgagaagcgatggcggcggcctgaactcacctaacaccgcagcagcaaccgggcccggccaggttcggcgttccgtgagtgaacgatttagaaatctggactggccagtgacctctgggcttgccattccagcctggtataacctctggctccatgggcagctactggctcctacagaccggatgaagcagactggagacacaagtggagaaaacctccagctggcaaatcctcagagtgtaggcctctggctgccagtcctgcccagcctgcctcatggagaggatgaattggctgagcagactggcctcccggggccctgggcaccgtatacctcaaggggccaatctccaaaccccagtcatggctgatcccgagacctgcctcatggtcttcaagaatcactggtcccaggtggtgcgaatcctggagcggcaaggccctcgggcagctcctgggggtgcagacgatctcagtgctgtgcgcaaccacacttaccagatgttgacactgctggcagaggaccgtgcagttccctcggcccccacaggccctgggtccctgctggagtttgctctgcacgaggatctgctgacccgtgtgttgacatggcagctgcaatgggatgagcttggggatggggtcgaggaacggcgggctgagcaactgaaactatttgaagtgctagtgagcgaagctcgccagccactgttgcggcatggtccagttcgtgaggctctgctcaccctgctggatgcctgtggccgccctgtgcccagtagcccagcactggatgaaggcttggtgctacttctcagccagctgtgtgtttgtgtggcccaggagccttcattgctcgagttcttcctgcagccacctcctgagcctggagccgctccccgtcttcttctcttttctcgccttgtcccttttgtgcatcgagagggcaccctgggccagcaggcccgtgatgccctacttcttctcatggctttgtcagctgggagccccactgtgggccgctacatcgcggatcactcttacttctgcccggtgctggccacagggctcagtgccctgtactcatcactgcctcgaaagattgaggttccaggggatgattggcactgtctgcgacgggaagactggctgggagtgccagcccttgcactcttcatgagttccctggagttctgcaatgcagtaattcaggtggctcaccccctggtgcagaagcagttggttgattatatccataatgggttcctggtgcctgtcatgggtcctgccttgcacaagacctctgtggaggagatgatcgccagtaccgcctacctggaacttttcctacggagtatctcagagcctgctttgctccgtaccttcctgcgattcctgttgttgcaccggcatgacacccacaccatcctcgacaccctcgttgctcgtattggcagtaactcccggctctgcatggtctctctgagtctcttcaggaccctcctgaacctcagctgtgaggatgtcctgctgcagctggttctcaggtatcttgttccatgtaaccacgttatgctgagccagaagccggctgttcgtgatgtggacctatatggacgagcagctgacaagtttctctccctaatcccacgctgttgtcggcaccacgcccccagcccacctcgtccagagcatgcctcatgggcacgaggtgggcctagcagagagacagggagaagggaggacatcacgggtcctggaagcccaagtgtggactcctcttctgtgacgacagtaccccggccctccacaccatctcgtctggttctcttcctgcggcagcagagcctgggtggctctgagtctccaggcccagccccttgctcaccagggctttctgcatcccccgcctccagccctggccgacggcctacccctgcagaggagcctggagagctggaagacaattacctggagtatctgcgtgaggcacgtcgtggtgtggaccgctgtgtccgagcctgccgtacctggtctgccccctatgatggcgagcggccctctcctgagcccagtccttttggctcccggactaagaaacgcagcctactgcctgaggaggacaggaacaacgtgggggaaggggaggaggaagagctggggaggagggggcgggctgggggtgcaggggagggccctggtcacctgccccctccccagctcaatggagtgccaggatcatggcctgagggggccaagaaggttcgtctggtgccaaaggagggagctggggaactgctagagggcatctccgagggcatggcaggactagagggctttgggcaggagctccgggagctagaggtggcattgagcaatgggggaactggctcagagtcccccttagaacctccactgccccttgaggaggaggaggcctacgagagcttcacctgtccccctgagccccctggccccttcctcagcagccctttgcggactctcaaccagctgccaagccagcccttcactggccccttcatggctgtgctctttgccaaactcgagaacatgctgcagaactccgtctatgtcaacttcctgctgacggggctggtggcccagctggcctgtcacccccagcccctgctccgctctttcctgctcaacaccaacatggtcttccagcccagtgtcaagtccctgctgcaggtgctgggctctgtgaagaataagattgagaactttgcggcttcccaggaggacttcccagcactgctgtccaaagccaagaagtacctcattgcccgtggcaagttggactgggctgagggccctgcagcaggacctgccccacgccgttctgatcccctagtgaagagccggaggccatccttgggggagttactcctgcggcatgcacacagtccaaccagggcccggcaggcggcacaattggtccttcagcctgggcgagacggagcaggacttggcctaagtgggggctcccctggggcttcaactccagttctactcacccggggcggggcccctgaacgccaaggtgaggctcttcgagtcaagaatgctgtctactgtgcagtcattttccctgaatttctcaaggagttggctgccatctcccaggctcatgccgtcacctcgcctttcttgttggagacttcagaggaaggatctggccctctcatctcaggctgtgggcccctcaatccttaactttcttccatggacaatcagggccatgggtggcccgggctggggctagggcacaggctcctttttatgtttggaggcagtgacaaaaggactttttaatttatttcagatgaatgttttatggagaacttgttgcaatatgtataaaagggaaatctccaaaaaaaaaaaaaaaaaaa

SEQ ID NO: 1117 - DNA, 2904 bp, human
aagtgctctcctgacccgccgctgtgcagcgcagcgcaccgcgggaagatggcgttggaggtcggcgatatggaagatgggcagctttccgactcggattccgacatgacggtcgcacccagcgacaggccgctgcaattgccaaaagtgctaggtggcgacagtgctatgagggccttccagaacacggcaactgcatgtgcaccagtatcacattatcgagctgttgaaagtgtggattcaagtgaagaaagtttttctgattcagatgatgatagctgtctttggaaacgcaaacgacagaaatgttttaaccctcctcccaaaccagagccttttcagtttggccagagcagtcagaaaccacctgttgctggaggaaagaagattaacaacatatggggtgctgtgctgcaggaacagaatcaagatgcagtggccactgaacttggtatcttgggaatggaggccactattgacagaagcagacaatccgagacctacaattatttgcttgccaagaaacttaggaaggaatctcaagagcatacaaaagatctagacaaggaactagatgaatatatgcatggtggcaaaaaaatgggatcaaaggaagaggaaaatgggcaaggtcatctcaaaaggaaacgacctgtcaaagacaggctagggaacagaccagaaatgaactataaaggtcgatacgagatcacagcggaagattctcaagagaaagtggctgatgaaatttcattcaggttacaggaaccaaagaaagacctgatagcccgagtagtgaggattattggtaacaaaaaggcaattgaacttctgatggaaaccgctgaagttgaacaaaatggtggtctctttataatgaatggtagtcgaagaagaacaccaggtggagtttttctgaatctcttgaaaaacactcctagtatcagcgaggaacaaattaaggacattttctacattgaaaaccaaaaggaatatgaaaataaaaaagctgctaggaagaggagaacacaagtgttggggaaaaagatgaaacaagctattaaaagtctaaattttcaagaagctgatgatacatcacgagaaacttttgcaagtgacacgaatgaggccttggcctctcttgatgagtcacaggaaggacatgcagaagccaagttggaggcagaggaagccattgaagttgatcattctcatgatttggacatcttttaagtacattttcaacagtttgaggactaagcctttctaaaataacattgtaataaaccatttttactgagattgcaacgttttgcactgataaacatgagaatctggaggaaagacaattgttttcttgtttaaaatatgtgtggaaaggaatgcaattgatagaacatttaaagatatatctgacaaaatacttaagagtatatagcacaggatttaatttctcaatctgttgcatgtgctaattatgagtattactagttgataatcagttttgtctaggtcataacataccatttgtaagtttgtttgctttttcaggtttatctttgcagtgaattatgctttgctttaaaacattccgctaaaatcataatgggacatataaattattaagctgttagaaatgcattcaaatttgttttttctgtgttctaagaactcaggcaattttaaggataaaaactaacattggccaggcacggtggctcacgcctgtaatcccaacactttaggagaccaaggcgggcagatcacttgaggtcgggagtttgagaccagccaggccaacatggtgaaacttcatctctactaaaaatacaaaaactagccaggtgtggttctccatgcctataatcccggctactcgggaggctgaggcaggagaatcacctgaacccccaggctggagtacagtggcaggatctcagcttactgcagcttccatctcccaggttcaagcgatcatgtgcctaagcctcctgagtagctgggatcacaggtgtgtaccaccacgcccagctgatttttgtatttttagtaaagactttcgccatgttgtccaggctggtctcgaactcctggcctaatgatctgcccacctctgcctcccaaagtgctgggatcacaggcatgagccaccgaacccagccttattctgcttaaatttgacgtgttttttgacttcttaattaacttggtcatatactaaacgtgatctcctgtggattaccacatgcattaaaaaatttttcaagctgggcgtagtggcgcacacctgcaatcccaacactttgggaggccaagaagaggaagattgcttgagcccaggagtttgagaccaatctaggcaatgtagtgagaccctgtctctaatttaaaaaagaaaaagaaaaaaacattcccagtggcagcctgcctaagactgtcttaccttatgttaaggaagtcaggtatttaaaatgttacatatgccggcgcagtggctcatgtgtgtaatcccagcactctgggaggctgagacaggtagatcatttgaggtcaggagttcaaaaccaacctggtctacatggtgaaaccccatctcaactaaaaatacaaaaaatacaaaaaattagccgggcgcggtggctcacacctgtaatcccagcactttgggaggtggaggcgggtggatcacaaggtcaagagatcgagaccatcctggccaacatggtgaaaccctgtctctattaaaaatacaaaaattagctgggcgtggtggcgcatgcctgtagtcccaactactagggaggctgaggcaggagaatcacttgaacccaggaggtggaggttgcagtgagccgagatcacgccactgcactccagcctggcgacagagcgagactccctctc

SEQ ID NO: 1118 - DNA, 2506 bp, human
cactgcccgtccgctcttcagcagccggtcgcgggcggtggaaaagcgagtgaagagagcgcgacggcggcggcggcggcggcgcagctattgctggacggccagtgggagagcgaggcctgagcctctgcgtctaggatcaaaatggtttcaatcccagaatactatgaaggcaagaacgtcctcctcacaggagctaccggttttctagggaaggtgcttctggaaaagttgctgaggtcttgtcctaaggtgaattcagtatatgttttggtgaggcagaaagctggacagacaccacaagagcgagtggaagaagtccttagtggcaagctttttgacagattgagagatgaaaatccagattttagagagaaaattatagcaatcaacagcgaactcacccaacctaaactggctctcagtgaagaagataaagaggtgatcatagattctaccaatattatattccactgtgcagctacagtaaggtttaatgaaaatttaagagatgctgttcagttaaatgtgattgcaacgcgacagcttattctccttgcacaacaaatgaagaatctggaagtgttcatgcatgtatcaacagcatatgcctactgtaatcgcaagcatattgatgaagtagtctatccaccacctgtggatcccaagaagctgattgattctttagagtggatggatgatggcctagtaaatgatatcacgccaaaattgataggagacagacctaatacatacatatacacaaaagcattggcagaatatgttgtacaacaagaaggagcaaaactaaatgtggcaattgtaaggccatcgattgttggtgccagttggaaagaaccttttccaggatggattgataactttaatggaccaagtggtctctttattgcggcagggaaaggaattcttcgaacaatacgtgcctccaacaatgcccttgcagatcttgttcctgtagatgtagttgtcaacatgagtcttgcggcagcctggtattccggagttaatagaccaagaaacatcatggtgtataattgtacaacaggcagcactaatcctttccactggggtgaagttgagtaccatgtaatttccactttcaagaggaatcctctcgaacaggccttcagacggcccaatgtaaatctaacctccaatcatcttttatatcattactggattgctgtaagccataaggccccagcattcctgtatgatatctacctcaggatgactggaagaagcccaaggatgatgaaaacaataactcgtcttcacaaagctatggtgtttcttgaatatttcacaagtaattcttgggtttggaatactgagaatgtcaatatgttaatgaatcaactaaaccctgaagataaaaagaccttcaatattgatgtacggcagttacattgggcagaatatatagagaactactgcttgggaactaagaagtacgtattgaatgaagaaatgtctggcctccctgcagccagaaaacatctgaacaagttgcggaatatacgttatggttttaatactatccttgtgatcctcatctggcgcatttttattgcaagatcacaaatggcaagaaatatctggtactttgtggttagtctgtgttacaagtttttgtcatacttccgagcatccagcactatgagatactgaagaccaaggattcagcattagaacatctatacatatggtgatctaaatgtacaaaatgtaaaatgtataagtcatctcactttttgtcaagacattaaaccatcttagatcggagtgtgaagtaaattatggtatattttatgtaacattttaatgtttatgctcataaaacttagtgaacacactgtgttatgccagctcaaatctacagtagccaccaaaaccatgacttaatattttgagccctagaagaaaggggtgtgctgaggacaagagtggggaaataggaacactgaccagtataactgtgcaattctggaacatattaattaaaataatatgccttaacatatagtgaatttctaattctaatgttcagtgcaatggaagacatttatttggacagtatactagcaaagttggtagatatttgattcttcattttttgtttttttcattagttgaagtgggttttagttttgtttaaaattataaccagcgtattttcacatcattctgtaagttaaatgatatcaaacatgaaagagatgttctcatttttctttttctgattaaacgtctgatgcatatcatttttctataagtaatcagttgcttttaaaatcagaaggctatattattctaatgaccctattcgatctaaatgggtttgagaatccatatcagcaacatacgtgttttttgacagaaagtgaaaacaaattccgtaaaactgttagtatcaaaaagaataggaatacagttttcttttccacattatgatcaaataaaaatcttgtgagattgttaaaaa

SEQ ID NO: 1119 - DNA, 1010 bp, human
gtctggccccgccttttctctgctctcctgaacctttaggcttgtctcggcccatttgaagaccaggaagttgatcaatcccgaggctgctgagagacggtggcgcgattgggacagtcgccagggatggctgagcgtgaagatgcagcgggtgtccgggctgctctcctggacgctgagcagagtcctgtggctctccggcctctctgagccgggagctgcccggcagccccggatcatggaagagaaagcgctagaggtttatgatttgattagaactatccgggacccagaaaagcccaatactttagaagaactggaagtggtctcggaaagttgtgtggaagttcaggagataaatgaagaagaatatctggttattatcaggttcacgccaacagtacctcattgctctttggcgactcttattgggctgtgcttaagagtaaaacttcagcgatgtttaccatttaaacataagttggaaatctacatttctgaaggaacccactcaacagaagaagacatcaataagcagataaatgacaaagagcgagtggcagctgcaatggaaaaccccaacttacgggaaattgtggaacagtgtgtccttgaacctgactgatagctgttttaagagccactggcctgtaattgtttgatatatttgtttaaactctttgtataatgtcagagactcatgtttaatacataggtgatttgtacctcagagcattttttaaaggattctttccaagcgagatttaattataaggtagtacctaatttgttcaatgtataacattctcaggatttgtaacacttaaatgatcagacagaataatattttctagttattatgtgtaagatgagttgctatttttctgatgctcattctgatacaactatttttcgtgtcaaatatctactgtgcccaaatgtactcaatttaaatcattactctgtaaaataaataagcagatgattcttataaaaaaaaaaaaaaaaaa

SEQ ID NO: 1120 - DNA, 3166 bp, human
ggcggcttccggcgcggcggttccggacaaccgtgcgcttttagtaaaagattggggttcgcgcgggggagaagggctgccccgggccctctggttctcgtcccgcagcgtccgctcccccgcgccactgcgccgctcccaggaaccctgtactccggggtcgccggcttctctcctgcctccggtcccgccagacacctcgagctccttaagtagctcggtccttgacgtccctctgggcccttcccgcgtctatcgcctgagtccccgggcccctctagccctctgttccctcccctcttttgttcctccctagagccccgccgccctcagggctgacagtgtggacggcgggagtctcctcgctcccctgctgggattgactgaccgagcgtttagtgactgcccagatctggctgatgggggtaccgagaggtggcctgggccgggaatgtccagctagagtcttccgtggaagtcagacatgaaactgacaggcctaagggaagctaggaagtcccctcaccgctcagccagggtgatgggctggactgacagactccagtgaatttgagcttgcctgtcaggctgattggctgatagacagccctggattggctcactaagactgaccagcccgggaccaagcagttctggggtcccaacctgggtggaaggtctgaactgatgacccacccaggctgaccaggccagcccacctcactgacctcctgacccctgacctcatcacctgtgcagccatggagaagatgtcccgtgtgaccacagccctgggtggcagcgtgctgacaggccgcaccatgcactgccacctggatgctcccgccaatgccatcagtgtgtgccgcgacgcagcccaggtggtcgtggcaggccgtagcatcttcaagatctatgccatcgaggaggaacagttcgtggaaaagctgaacctgcgtgtggggcgcaagccttcgcttaacctgagctgtgctgacgtggtctggcaccagatggatgagaacctgctggccacagcagccaccaatggcgtggtggtcacgtggaacctgggccggccatcccgcaacaagcaggaccagctgttcacagaacacaagcgcacggtaaacaaagtctgcttccaccccaccgaagcccacgtgctgctcagtggctcccaggatggcttcatgaagtgctttgacctccgcagaaaggactctgtcagcaccttctcgggccagtcggagagcgtgcgggacgtgcagttcagtatccgggactacttcaccttcgcctccacctttgagaacggcaatgtgcagctctgggacatccggcgtcccgaccggtgcgagaggatgttcacagcccacaacggacccgtcttctgctgcgactggcaccccgaggacaggggctggttggccactggagggcgcgacaagatggtgaaggtctgggacatgaccacgcaccgtgccaaggagatgcactgtgtgcagaccatcgcctcggtggcccgtgtgaagtggcggccagagtgccgccaccacctggccacgtgctccatgatggtggaccacaacatctatgtttgggacgtgcgccggcccttcgtgccagctgccatgtttgaggaacaccgagacgtcaccacgggaattgcctggcgccacccccacgacccctccttcctgctgtctggctccaaggacagctcgctgtgccagcacctgttccgcgacgccagccagcccgtcgagcgcgccaaccctgagggcctctgctacggcctcttcggggacctggccttcgccgccaaggagagcctcgtggctgccgagtcggggcgcaagccctacactggcgaccggcgccaccccatcttctttaagcgcaagctggaccctgccgagcccttcgcaggcctcgcctccagtgccctcagtgtctttgagacggagccaggtggcggcggcatgcgctggtttgtggacacagctgagcgttatgcgctggctggccggccactggccgagctctgtgaccacaacgcaaaggtggctcgagagcttggccgcaaccaggtggcgcaaacgtggaccatgctgcggatcatctactgcagccctggcctagtgcccactgcaaacctcaaccacagtgtgggcaagggtggctcctgtggcctcccgctcatgaacagtttcaacctgaaggatatggccccagggttgggcagtgagacgcggctggaccgcagcaaaggagatgcacggagcgacacagttctgctcgactcctcggccacactcatcaccaatgaggataacgaggaaaccgagggcagcgacgtacctgccgactacctgctgggtgacgtggaaggtgaggaggacgagctgtacctgctggatccggaacacgcgcaccccgaggaccctgagtgcgtgctgccgcaggaggcctttccgctgcgccacgagatcgtggacacgcctcccggacccgagcacctgcaggacaaggccgactccccgcacgtgagcggcagcgaggcggatgtggcctccctggcccccgtggactcctccttctcgctcctgtctgtctcacacgcgctctacgacagccgcctgccgcccgacttcttcggcgtgctggtgcgcgacatgctgcacttctacgctgagcagggcgacgtgcagatggctgtgtctgtgctcatcgtcctgggtgaacgggtgcgcaaggacatcgacgagcagacccaggagcactggtacacttcctacatcgacctgctgcagcgcttccgcctctggaacgtgtccaacgaggtggtcaagctgagcaccagccgcgccgtcagctgcctcaaccaggcctccaccaccctgcacgtcaactgcagccactgcaagcggcccatgagcagccggggctgggtctgcgacaggtgccaccgctgcgccagcatgtgtgccgtctgccaccacgtagtcaagggtctcttcgtgtggtgccagggctgcagccacggcggccacctgcagcacatcatgaagtggctggaaggcagctcccactgtcccgcaggctgcggccacctctgcgagtactcctgacggggcatctgctgggcttgcccgggcggccg

SEQ ID NO: 1121 - DNA, 3211 bp, human
gaggggcggggataaatgcggagggacggtccagctttagctctctgctcgccgccgccgctgtcgccgccacctcctctgatctacgaaagtcatgttacccaacaccgggaggctggcaggatgtacagtttttatcacaggtgcaagccgtggcattggcaaagctattgcattgaaagcagcaaaggatggagcaaatattgttattgctgcaaagaccgcccagccacatccaaaacttctaggcacaatctatactgctgctgaagaaattgaagcagttggaggaaaggccttgccatgtattgttgatgtgagagatgaacagcagatcagtgctgcagtggagaaagccatcaagaaatttggaggaattgatattctggtaaataatgccagtgccattagtttgaccaatacattggacacacctaccaagagattggatctgatgatgaacgtgaacaccagaggcacctaccttgcatctaaagcatgtattccttatttgaaaaagagcaaagttgctcatatcctcaatatcagtccaccactgaacctaaatccagtttggttcaaacagcactgtgcttataccattgctaagtatggtatgtctatgtatgtgcttggaatggcagaagaatttaaaggtgaaattgcagtcaatgcattatggcctaaaacagccatacacactgctgctatggatatgctgggaggacctggtatcgaaagccagtgtagaaaagttgatatcattgcagatgcagcatattccattttccaaaagccaaaaagttttactggcaactttgtcattgatgaaaatatcttaaaagaagaaggaatagaaaattttgacgtttatgcaattaaaccaggtcatcctttgcaaccagatttcttcttagatgaatacccagaagcagttagcaagaaagtggaatcaactggtgctgttccagaattcaaagaagagaaactgcagctgcaaccaaaaccacgttctggagctgtggaagaaacatttagaattgttaaggactctctcagtgatgatgttgttaaagccactcaagcaatctatctgtttgaactctccggtgaagatggtggcacgtggtttcttgatctgaaaagcaagggtgggaatgtcggatatggagagccttctgatcaggcagatgtggtgatgagtatgactactgatgactttgtaaaaatgttttcagggaaactaaaaccaacaatggcattcatgtcagggaaattgaagattaaaggtaacatggccctagcaatcaaattggagaagctaatgaatcagatgaatgccagactgtgaaggaaaatataaaaaaaaagtcgactgctatgctcaaaaagtaaaaaaagctcaacagttaaaatctaatgtttgttttctttcctgttatattataaggatatgcacgtttgttctggaaaagatagaatttgtctctaaaagacttgaaattgtaattaaaatggcaagctaatcaaacataagcttcattaagtgggattctaagacagtctgtgtttttatatttcaagggtttaaccctttgagccttacatctcattcactgtctttctccaagaaaagtattttgggcggacagtcagatcaagcagtaaaattagctctttcaaatcttcttgtcatgtaaaatgaagctagtctgttttaaaatttttagttttggattgtatactaatgaaaatcttaatgatgtttttgatttttatatacttattttaaagaaaatcttatatagtacattttacaaaaattataaaaaatgaattagtactggcgaggactaaatgaaacaataatttttcattttgataactagctttccaggtggacttagccataggaaaatattactaatgtaatttaacaaattgctgcatgtattccatttaaaaatatgtttaaattgtcctaaaacaaaataattttctccctaggagtatgcatttggctacagtgttttgaaacagaaaccttagaataggtcattggtatgggctgaactgtgtatcccccaattcatttgttgaggtcctaactcccatttcttttgaatgtgactgttcggagatgaggcctttaaagaggtgacttaagttcaaaggaggctgttagtctaatccaacatggtgtcctttggacataagagataccagcaatgtgtgcacagaacaaagaccaggagaggacacagtgagaaggcagttatctgcaagcaaagagagaggcttcagaagaaacaaaatcaccagcaccttgatctttgacttctaatctccagaatagtgagaaataaatttctgttgttaagccgtccactgtgggaggccgacgcaggaggattgcttgaggccaggagttcaaggccagcctggacaacatagtaagaccctatctctacccccctaataaattaatttaaaaagccccccaatctgtggtattttattatggcagccctagcaagctaatacagtggtttgagaggctgggagggttgaggggaagataaacttttaaaaagctcttatctttcatttcaatcagttaaaaatacttgctcagtgtaacaattttgcttctcagcttccactctaatattgttgtgccattaagcaatttagctaatcctgacatttcttagattcataatgttaggagcatttaatctgtattttacaagttaggaagcagaggatcagagatgggaaaggactagcccaaggccaacattaacaagccctctaacaaaaactttacaatacatttatgttgaatggaactccaagatctcacctctccatccaggaatggagtccatgtaatcaaagtgaacttaaaaataggacagtttcaacaagtcaggagattcacagcaactgatcaaagggagtccagtcaacgtgagcaagcgtgattatgatgaggaagccccctctgctttaatccacacaaggaacgtaacctgaagtaacctgatgttaaccaatctgctgtgtctactatgctgtttccttgttcctgctagtgctgctttacaaatgcagaccattctatcatacctggcggggcttctgttttattttgtaggctggatgctacccagttcatgaatcgctaataaaagccaattagatcttt

SEQ ID NO: 1122 - DNA, 1287 bp, human
agcaagctcggtggctgggtgggttggggcgttccgcgcgcccttcattgaagcggcggtggccgggctgggcgccggtagtggaaagcgacggcgcggctggaaaatgccagtccattcccgaggggataagaaggagaccaaccatcacgatgagatggaggtggactacgccgaaaatgaggggagcagctccgaggacgaggacactgagagctcgtcggtctccgaggatggagatagctcagaaatggatgatgaagactgtgaaagaagaagaatggaatgtttggatgaaatgtccaatcttgaaaaacagtttaccgatctcaaagatcaactttataaagaacgattaagtcaggtggatgcaaaactacaagaagtcatagctggaaaagcaccagaatacttggaaccgctggcaactttacaggaaaatatgcaaattcgtacaaaggtagcaggaatctatagagagctctgcttagaatctgtaaagaacaaatatgaatgtgaaattcaagcttctcgccagcattgtgagagcgaaaagctgttgctatatgatacagtccagagtgaactagaggagaagataagaaggcttgaagaggataggcacagcattgatattacctcagagctgtggaatgatgagcttcagtcaagaaaaaagaggaaggatcctttcagtcctgacaaaaagaagccagttgttgtttcaggtccatatatagtttatatgctacaagatcttgatattcttgaagactggacaacaattaggaaggcaatggctacattggggccacacagagtgaaaacggaaccacctgtgaaactggaaaaacatctgcacagtgctagatctgaagagggaagactatattatgatggtgaatggtatatacgtggacaaacaatatgtattgataaaaaagatgaatgtcctacaagtgctgtaattacaacaattaaccatgatgaagtttggtttaagaggcctgatggaagcaaatctaagctttacatttcacagctacagaaaggaaaatattcaattaaacattcataatcatgatttaagtgttatctaaatttaccttattagtgttaccaaatgtaagtgccatgagagtaaaaaaatgtattcaataacttaatattctcactgaatcatgagagaatgtgtatttgtaggtagtactctaaatagatctcattgatatgttattaaaagaaacagtaataaaaattttatcacgaaaaaaaaaaaaaaaaaac

SEQ ID NO: 1123 - DNA, 3685 bp, human
gcggggcggcgggcgtgtccgaagtcgcgcgcggctggcgcgcggtcccgagtgaaaggagaaggaggggcgctgggggtgacggtgcggagccgctgccagcgctgggcgagagtcggcggccggatccgaggagcaggcgggcctgaggccgagtcagctgcgcgggcccccggatcccccgacagagcggcggcggtgtctggccaggcggtaggcgctgcctggccgcggcggggaagatgttcagcgtagagtcgctggagcgggcggagctgtgcgagagcctcctcacttggatccagacatttaatgtggatgcaccatgccagaccgtggaagatttaacgaatggggttgtgatggcccaggttcttcaaaagatagatcctgcatattttgatgaaaattggctaaacagaatcaaaactgaagtaggagataattggaggctaaagataagcaatttaaagaaaattttaaaaggaatcttggattataatcatgagattttaggacagcaaattaatgactttacccttcctgatgtgaaccttattggggagcattctgatgcagcagagcttggaaggatgcttcagctcatcttaggctgtgctgtgaactgtgaacagaagcaagagtacatccaagccattatgatgatggaggaatctgttcaacatgttgtcatgacagccattcaagagctgatgagtaaagaatctcctgtctctgctggaaatgatgcctatgttgaccttgatcgtcagctgaagaaaactacagaggaactaaatgaagctttgtcagcaaaggaagaaattgctcaaagatgccatgaactggatatgcaggttgcagcattgcaggaagagaaaagtagtttgttggcagagaatcaggtattaatggaaagactcaatcaatctgattctatagaagaccctaacagtccagcaggaagaaggcatttgcagctccagactcaattagaacagctccaagaagaaacattcagactagaagcagccaaagatgattatcgaatacgttgtgaagagttagaaaaggagatctctgaacttcggcaacagaatgatgaactgaccactttggcagatgaagctcagtctctgaaagatgagatcgacgtgctgagacattcttctgataaagtatctaaactagaaggtcaagtagaatcttataaaaagaagctagaagaccttggtgatttaaggcggcaggttaaactcttagaagagaagaataccatgtatatgcagaatactgtcagtctagaggaagagttaagaaaggccaacgcagcgcgaagtcaacttgaaacctacaagagacaggtagtagaactacaaaacagattatccgaagaatcaaagaaagcagataaactagattttgaatataagcggctaaaagaaaaagttgacagtcttcaaaaagaaaaggacaggctgagaacagaaagggattctctgaaggaaaccattgaagagcttcgttgtgtacaagctcaagaagggcagctcacaacacaagggttaatgcctcttggaagtcaggagtcttcagacagtctagctgcagagattgttacacctgaaatcagggagaaacttattcgtcttcagcatgagaataagatgttaaagcttaaccaagaaggttcggacaatgaaaaaatagccttattgcagagccttctagatgatgcaaatctacgcaagaatgaactggagacagagaataggctggtgaatcaaagacttctggaagtacagtcacaagttgaagaattacaaaaatctttacaggatcaaggctcaaaagcagaagattcagtccttctaaaaaagaagcttgaagaacatctagagaagctgcatgaggccaataatgaactacagaagaagagagccattattgaagatctcgagccaagatttaacaacagctccttaaaaattgaagaattacaagaagctttacgaaagaaagaggaagaaatgaagcaaatggaagaacgatacaaaaaatacttagagaaagccaaaagtgtcatccgtactttagatcctaaacagaatcaaggagcagcaccagaaatacaagctcttaaaaatcagctccaggaacgagaccgactgttccactcattagagaaagaatatgagaaaacaaagagtcagagagagatggaagagaaatatattgttagtgcctggtacaatatgggaatgaccctgcataaaaaggcagctgaagatagactggcaagcacaggctcagggcagtcatttctggcgaggcagaggcaagcgaccagcagcagaagatcatacccaggccacgtgcagccggccacagcaaggtagagaagttgtgccgctcaatcacagacacctgcacccacaacatacttctgttacacacaagaacatttcaggaaactcagccagcttattttttgtttctcttctatgtcaatacttagtgtttctcattttgaggactttttctctctcctgtatctttgttttagtttctttggtttttattttgtagtcctttcagttatttttaatgtgccaaaaatttgtacatgttcaattaaaaatgttgtataatagtgtaatacttttctttgtatgaaaatgtcctcttcttcaaaggtataggctttgtaatgaattagattttctgccaataattgatatacaatttatattctttattgtgcctgtgtgttaccatgctaagaatgtctttgtttaaagggaattaatctttttatgatgtattaatctgtgttttcaattgttttccaagtacagttcaaataacttgcatatttactatacaaaatggttgacaagtgttctttttgcaaagacttgaatacattggcagaggtgctaatcacatcttccctaaggcacctggaagaattatttgaggaaaaaatgagttttcacattgttttataggaaattaaatttgtccaaagatttggagactatttttaaaacataaatacataaaatttcattatttcctgctatcttgtttgctggcagaagtgaatgtttggtgaggttattttgggataaattacaaaagaaaaaaaattagacactgcattaatttcttgttcttttggaatatcttagtaactgaggatcattttctaacaatgtggttgacataccttcagttgctttccacatctaaaagagttatctttcatatatgtacaagttattggtagtcttatttttgggctgtttgttgacttatgccccatttgttttacttgttctttaatataaacccttccattttttaacaattcctaacacttgatatcttaatatcagtcactaacattagtaacttcttgtatgttatattatggcagatctctttacgttttttctcacatctatctgctagtccaggaatttgttactaaatagattttcttggatatttggttgcctcaaagtgcttacatttgttaacagattgtaaaccacatttatttacattgatgaatgggctgttgaataatcattgtaaagcactttgtatatataaggtgctatataagtgtgaaatatcattcatttataaatgaaatgccttctaactttccatattg

SEQ ID NO: 1124 - DNA, 7522 bp, human
aaagattgctttcttctgggacgctgcttgaacgctaaccgcgttgattggaacagattttgtgtcttggctggctttgggtgaagaccggggagaaaaggttgcgctgcgattctcaagatctctggacctggattatcattgcaaatccattaaagaaggagaagcaagcggatttcagagaggttgttcttcagaaaaaaatggttatttctttgaactcatgcctgagctttatttgtttattgttatgccactggattgggacagcatcacctctgaatcttgaagaccctaatgtgtgtagccactgggaaagctactcagtgactgtgcaagagtcatacccacatccctttgatcaaatttactacacgagctgcactgacattctaaactggtttaaatgcacgcggcacagagtcagctatcggacagcctatcgacatggggagaagactatgtataggcgcaagtctcagtgttgtcctggattttatgaaagcggggaaatgtgtgtcccccactgtgctgataaatgtgtccatggtcgctgtattgctccaaacacctgtcagtgtgagcctggctggggagggaccaactgctccagtgcctgcgatggtgatcactggggtccccactgcaccagccggtgccagtgcaaaaatggggctctgtgcaaccccatcaccggggcttgccactgtgctgcgggcttccggggctggcgctgcgaggaccgctgtgagcagggcacctatggtaacgactgtcatcagagatgccagtgccagaatggagccacctgcgaccacgtcacgggggaatgccgctgcccaccaggatacaccggagccttctgtgaggatctttgtcctcctggtaaacatggtccacagtgtgagcagagatgcccttgtcaaaatggaggagtgtgtcatcacgtcactggagaatgctcttgcccttctggctggatgggcacagtgtgtggtcagccttgccccgagggtcgctttggaaagaactgttcccaagaatgccagtgccataatggagggacgtgtgatgctgccacaggccaatgtcattgcagtccaggatacacaggggaacggtgccaggatgagtgtcctgttgggacctatggcgttctctgtgctgagacctgccagtgtgtcaacggagggaagtgttaccacgtgagcggcgcatgcctctgtgaagcaggctttgctggcgagcgctgcgaagcacgcctgtgtcctgaggggctctacggcatcaaatgtgacaaacggtgtccctgccacttggaaaacactcatagctgtcaccccatgtctggagagtgtgcctgcaagccgggctggtcaggactctactgtaatgagacatgttctcctggattctacggggaagcttgccagcagatctgcagctgccaaaatggggcagactgtgacagtgtgactggaaagtgcacctgtgccccaggattcaaaggaattgactgctctaccccatgccctctgggaacctatgggataaactgttcctctcgctgtggctgtaaaaatgatgcagtctgctctcctgtggacgggtcttgtacttgcaaggcaggctggcacggggtggactgctccatcagatgtcccagtggcacatggggctttggctgtaacttaacatgccagtgcctcaacgggggagcctgcaacaccctggacgggacctgcacgtgtgcacctggatggcgcggggagaaatgcgaacttccctgccaggatggcacgtacgggctgaactgtgctgagcgctgcgactgcagccacgcagatggctgccaccctaccacgggccattgccgctgcctccccggatggtcaggtgtccactgtgacagcgtgtgtgctgagggacgctggggccccaactgctccctgccctgctactgtaaaaatggggcttcatgctcccctgatgatggcatctgcgagtgtgcaccaggcttccgaggcaccacttgtcagaggatctgctcccctggtttttatgggcatcgctgcagccagacatgcccacagtgcgttcacagcagcgggccctgccaccacatcaccggcctgtgtgactgcttgcctggcttcacaggcgccctctgcaatgaagtgtgtcccagtggcagatttgggaaaaactgtgcaggaatttgtacctgcaccaacaacggaacctgtaaccccattgacagatcttgtcagtgttaccccggttggattggcagtgactgctctcaaccatgtccacctgcccactggggcccaaactgcatccacacgtgcaactgccataatggagctttctgcagcgcctacgatggggaatgtaaatgcactcctggctggacagggctctactgcactcagagatgtcctctagggttttatggaaaagattgtgcactgatatgccaatgtcaaaacggagctgactgcgaccacatttctgggcagtgtacttgccgcactggattcatgggacggcactgtgagcagaagtgcccttcaggaacatatggctatggctgtcgccagatatgtgattgtctgaacaactccacctgcgaccacatcactgggacctgttactgcagccccggatggaagggagcgagatgtgatcaagctggtgttatcatagttggaaatctgaacagcttaagccgaaccagtactgctctccctgctgattcctaccagatcggggccattgcaggcatcatcattcttgtcctagttgttctcttcctactggcattgttcattatttatagacacaagcagaagggaaaggaatcaagcatgccagcagttacctacacccctgctatgagggtcgtcaatgcagattataccatttcaggaacccttcctcacagcaatggtggaaacgctaatagccactacttcaccaatcccagttaccacacgctcacccagtgtgccacatcccctcacgtcaacaacagggacaggatgactgtcacgaagtcaaaaaacaatcaactgtttgtgaatcttaaaaatgtgaaccctgggaagagaggccctgtgggggactgcactgggacattgccggctgactggaaacatggcggctacctcaacgagctcggtgcttttggacttgacagaagctatatgggaaaatccttaaaagacctgggaaagaattctgaatataattcaagtaactgctccctaagcagttctgagaacccatatgccactattaaagacccacctgtacttatcccgaaaagctcagagtgtggttatgtggagatgaaatcgccggcacgaagagattccccatatgcagagatcaataactcaacttcagccaacaggaatgtctatgaagttgaacctacagtgagtgttgtccaaggagtattcagcaataatgggcgtctctcccaggatccatatgacctcccaaagaacagtcacatcccttgtcattatgacctgctgccagtccgagacagttcatcctcccctaagcaagaggacagtggaggtagcagcagcaacagcagcagcagcagtgaatgacaccaaaggaccgcttggtagccactggaaccctttccagaactgctgtttggttcttctccatcctcaattttgccactttcatgtgaatgttagtcaattcggtgggcaatttttggacatgaaccagaaagctgaaagctgaggctgacacggactgtaggtgctttttgttcaggtggattcgaaggagttagagatgtgatttgccattgctgttagttttagaactatacccgtgaagcatgacttattgtaagatgttggctgaaagcatgaacttgcagaactccctcggagacgcaggttgcagtggacattgggattgttgcttgaaaaattaaaatttgaatattttctctctcatttgcatcatacagctctacctaggattgtacagtttaccataaaatttacttcatgaaagtgggaatcactgaacatgtagaagacaaggaacatattgttaactcctgattcttaactttattcaactggactcagaattgtagggataatatgaatgcaggaggaaacattctgtcaggcggtatgactggacagactttgaatatactctaaaagtggacagaaaatttacgaaaatcttagattttgtttagaatgagaaaatatacaattagaattattttagaaatagtaggaagtattgcagaagtcaatacacaaatgtgccaggcagaggtggttttctctgtttgactctcaaccaacttcagatctatgacattattctgatcactggctccatcatacatattcaccacttgagattcataacatatcaatagttatttcataaatatagaaatgaaataattttatttttgacagactggatggaatgagtgtgtaatgattgataaaggttgtaaattttaaatgcaagatgacgcttacgttctgtaaaccattagtaatacatgctgtaatatagaattagtggaacattttgattaatctttccctagaagtgactgaaatatttttgtgcatatttgagaaagggaactttccttttattaattgtcaatttagagaaactatgcttaagctggtcttttgcattgctaatgtgacatgtacccaacttttcattaatttgtatttccatttttaaattgcatattctatgttttgtagtgtttggattgttaatgaaaaaatattatatgttcgttattccttgtattattgccacttatcttttgcttgataaaaatgcgttgttcttttttcttttggagggacaagatgaaaatatataatttgaattgattaaaattggtcgttactaaaatagtatagtaaccacaagtgattggcttataaatgaagtagaaatgctttttaatattccaaaatagagttccttttgatctgttggtgctgagccttggttaaaccagggagaaggggagcagaaaggaaacgttgttactgatgagtaccacagactcatcttaaaaaaaactctcattatggtgatcatagaattgaccatccaaactgggacactcttgagagtaaatggagggcattattaataattatcttgtaatgaacttaaatctggactgttccaggcaaaccagacttatcttgcaatatgagaatgctgacacaatgcaggaaagccagtttcccttttgttgatctacttgaccaagcaaaggggctgaaaaactgaataaggaaacaactttataagagaaacagtggtcttcaatcttttaaagacatgaaatcctatatggcattctgtctcagtgagtcagttaacaaatacgtatgtgcaacccttctgctagtagtgcacataagtgattatccctgccaggtatcgagttggaatatccagttatttcatgtcacacatcggcacgtatgatggtggtttggtcagatggataatacagcagacacacttagaacactcactgcactggtggctgttcattttgaggaactccaaagtcaattcaaggaaataaggaatgacctggaacaggccttagaaacaattgatttattccaatagttaaccactggctggctcccaactctaggtgataggcatctaattgagacatgtgtgagtcaatagccatcggggtcctttttggtgagaagaaataagacattttctcccttttaaagatcatctcttcagagctgcatggtaaatttgaatttccccattgttctctagagataggtcaaaaaaacaactgtttcttttcttattccactattaataaattgaaagcttgctgtacaaaggcaacagcaacttaaaaaagaaaatctggacaatagatgtggactccaaggggccactgccatcccttcctgtgtgctctttttgacaagtaaatcactccagttagctgatgtcctgaaatgacatttgtacctgaggcaattcttattagagcttactcaggacttttcaaacatcaggacacacatagcaatttggatgttgtaaaactacgtgttacatttggagaggtcttgttgagaaggcaaaattttctaaatattttgatatcaatttgggtaaagaaaggaatacttttgttagaatgagaattaaagagaaaacaaaagaatcttggcaaaattttccctctgaaattacaaactttaggaacttttccagatgtatcgaatttaatttgacattgatgtcactcttcataccaagtgaatctattctcatgaactttgaacccatgttaattttggaccctataactaatttcctttctgtatcccatggtggtcaaagcagtaaaggagtttagagatacttagcaaatgccattcatatagtattgttagccaaactattattccttccttagaagttgatgtatcagaaaatttataagttatttgtatttatatataagtacatcagaacttgcccacatgataactcatgtttgctttaataaggaaaatatgttatttgaggttaattatatgatagtgaggaacattttacaattatttacagtgtttgacattaattgctgtcctatgatacagtagtaatgttaacagagagtttaatatgtttagcattatctttatggaatttatattcaccaatttcaggaaaaccaaccatagaactttataataggacagttataacctgactgaaccaaatccatcagcataatgactgtgtgttctgagaaatgcaaacaactttatgaaagtgtggtcatcttgacccccaaagagccacagtagctgtcaattattgagatttttaaatggtaaatattgcaaaagttaaacaagggtaccacaatatcatttataattgatgtcaatattagtagtccactttatgcttaaaataaaatcataaaaaatcaagttttaaggttatattttttaaaataatgaattttctatctctaggcaacatgtctttattattcaagctgaatgtttaagagagattttggtcttaaaggcttcatcatgaaagtgtacatgcatatgcaagtgtgaattacgtggtatggatggttgcttgtttattaactaaagatgtacagcaaactgcccgtttagagtcctgttaatattgatgtcctaacactgggtctgcttatgctagttcagtatttggtctaggcttcattttgatatgactgaattgcaatctatatttttaaaaagaaaaatcaaaatacattagggtttacttggttgtggcaaacaaacaaaaaatgctttcagtgttgaaatatctctattttccaaagatgataaactttcatcgttcttagcctacattgtcatttatatcaccaaatgagtttatagattaatgcaataaactttctaat

SEQ ID NO: 1125 - DNA, 4684 bp, human
cttcggtctcttctccccggctgatcccagcactctccgtgacagcgcctcctgactcagcccaggaccggcttcttctcacgacctgctggagactggacgcccacacctgacccggaactcggaggcgtgcttcctccacccgccggctagcagccccgggccctgagctcccgccgacgccgctggggggcccgacaggcccctcggcgctgatgctgagtgggatcgagggcccggggcggcggcggagtacgggcctctggcgccttaggccagccgcaggtgtcggttcttaggctctccaggctcgctagctcccgccccggcttggatgggtctccctgcgccataaatgtggctgctgaggcggcggtggccgtggcccgtcgcgctgctgctgcggcgctccaagttcatctccgccccggggctctcctgccccacctcggggctgccgccacccgctccttatcccctggccctggccttgcagcgtggcgacaatggacaagatcctggagggccttgtgagttcctcgcatcccctgcccctcaagcgggtgattgtgcggaaggtggtggaatcggcggagcactggctagacgaggcgcagtgcgaggccatgtttgacctgacgacccggctcatcctggagggccaggaccctttccagcggcaggtggggcaccaggtgctggaggcctacgcacgataccaccggccagagttcgagtccttcttcaacaagaccttcgtgttgggcctccttcatcagggctaccactctctggacaggaaggatgtagccatcctggactacattcacaacggcctgaagctgattatgagctgtccgtcggtgctggatctctttagcctcctgcaggtagaggtgttacggatggtgtgtgagaggccggagccgcagctctgtgcccgactgagcgaccttctgaccgactttgtgcaatgcatccccaaggggaaattgtccatcacgttctgtcaacagctggttcgaacgataggccatttccagtgcgtgtccacccaggaaagagagctgcgggaatatgtctcccaggtgacaaaagtgagtaacttgctgcagaacatctggaaggccgagcctgccacactactgccttccctgcaagaagtttttgcaagcatctcttccacagatgcatcatttgaaccttctgtagcattggcaagccttgtgcagcatattcctcttcagatgattacagttctcatcaggagccttactacggatccaaatgtaaaagatgcaagtatgacccaagccctttgcagaatgattgactggctatcctggccattggctcagcatgtggatacatgggtaattgcactcctgaaaggactggcagctgtccagaagtttactattttgatagatgttactttgctgaaaatagaactggtttttaatcgactttggtttcctcttgtgagacctggtgctcttgcagttctttctcacatgctgcttagctttcagcattctccagaggcgttccatttgattgttcctcatgtggttaatttggttcattctttcaaaaatgatggtctgccttcaagtacagccttcttagtacaattaacagaattgatacactgtatgatgtatcattattctggatttccagatctctatgaacctattctggaggcaataaaggattttcctaagcccagtgaagagaagattaagttaattctcaatcaaagtgcctggacttctcaatccaattctttggcgtcttgcttgtctagactttctggaaaatctgaaactgggaaaactggtcttattaacctaggaaatacatgttatatgaacagtgttatacaagccttgtttatggccacagatttcaggagacaagtattatctttaaatctaaatgggtgcaattcattaatgaaaaaattacagcatctttttgcctttctggcccatacacagagggaagcatacgcacctcggatattctttgaggcttccagacctccatggtttactcccagatcacagcaagactgttctgaatacctcagatttctccttgacaggctccatgaagaagaaaagatcttgaaagttcaggcctcacacaagccttctgaaattctggaatgcagtgaaacttctttacaggaagtagctagtaaagcagcagtactaacagagacccctcgtacaagtgacggtgagaagactttaatagaaaaaatgtttggaggaaaactacgaactcacatacgttgtttgaactgcaggagtacctcacaaaaagtggaagcctttacagatctttcgcttgccttttgtccttcctcttctttggaaaacatgtctgtccaagatccagcatcatcacccagtatacaagatggtggtctaatgcaagcctctgtacccggtccttcagaagaaccagtagtttataatccaacaacagctgccttcatctgtgactcacttgtgaatgaaaaaaccataggcagtcctcctaatgagttttactgttctgaaaacacttctgtccctaacgaatctaacaagattcttgttaataaagatgtacctcagaaaccaggaggtgaaaccacaccttcagtaactgacttactaaattattttttggctccagagattcttactggtgataaccaatattattgtgaaaactgtgcctctctgcaaaatgctgagaaaactatgcaaatcacggaggaacctgaataccttattcttactctcctgagattttcatatgatcagaagtatcatgtgagaaggaaaattttagacaatgtatcactgccactggttttggagttgccagttaaaagaattacttctttctcttcattgtcagaaagttggtctgtagatgttgacttcactgatcttagtgagaaccttgctaaaaaattaaagccttcagggactgatgaagcttcctgcacaaaattggtgccctatctattaagttccgttgtggttcactctggtatatcctctgaaagtgggcattactattcttatgccagaaatatcacaagtacagactcttcatatcagatgtaccaccagtctgaggctctggcattagcatcctcccagagtcatttactagggagagatagtcccagtgcagtttttgaacaggatttggaaaataaggaaatgtcaaaagaatggtttttatttaatgacagtagagtgacatttacttcatttcagtcagtccagaaaattacgagcaggtttccaaaggacacagcttatgtgcttttgtataaaaaacagcatagtactaatggtttaagtggtaataacccaaccagtggactctggataaatggagacccacctctacagaaagaacttatggatgctataacaaaagacaataaactatatttacaggaacaagagttgaatgctcgagcccgggccctccaagctgcatctgcttcatgttcatttcggcccaatggatttgatgacaacgacccaccaggaagctgtggaccaactggtggagggggtggaggaggatttaatacagttggcagactcgtattttgatcctgagagagtccaaaatgcactggtcacgaaacgtctaatactatgactgttaaaatgtcagactataacaaatatctatcttttatttttcattagacccttatacttcaagagaacacactcagtgcttgtttttattttcttgacacatttattaacaaaatgcatcatggaaaaaaaatctacctcttaaaattccatttgcttttatggttagacatgcttgaccaaaaatgttcagaagaaaatatgtacctggtccctaattaagctgcgttaaatttggtagaagcatttaaatggtctatcttcagttttactgaacaaaaaatgtaatttatttagcattctttataaaagaattgatgctagaggtaaaaaaaaatacttgtttttaaaaaatcctttacgtcttgtgtaattaccccattattaaattcaagtccttgaaaatcaactagagattataaagtctctaaagaaggcaataacaaaatttatcaagatatagtacttttcagtttttgtttagtgtcttcagcatcactgtgtctgtatttcaagtacaaatgtttttaaaaaggattctttatacatatgtgctgaattgattttaagaaagttgcatgatcctgtaggagcaacatttttacctaaaaaatgctaactttatagtatttctaattgttcaaggattttaaaattctatttcagggagtatatcttctgtggttttgaaggaggtgagttctgtatgtgccttgcagtactgtaattcaaaaataggaatctttggctgcaaaattttaatgaaatgttaggaagtaattttcgtgctaacattaaaattataactttttgaaaggtaatagattttccagaagtaaaatctgatggttctaaatcaatcaatgtgatagttcatttttaactcttagaagaattcagaggaaattaacccagctaagtaaaaaatctgtcttgattttgttacttattcctcagaatattaaacattgatcacataaaaaaaaaaaaaaaaaaaa

SEQ ID NO: 1126 - DNA, 1909 bp, human
tgaagacaagttgggagcccaattgtttgttgcaactccaactccggccccttcaccatgcactccttggacgagccgctcgacctgaagttgagtatcaccaagctccgggcggcaagagagaagcgggagaggacgctgggtgtggtccggccccgtgctctgcacagggagctgggcttggtggatgacagcccaacacttggctctccaggctccccgccctcaggcttcctgctgaactccaagttccccgagaaggtggagggacgcttttcagcagcccctctcgtggacctcagcctgtcaccaccatctgggctggactcccccaatggcagcagctcgctgtcccccgagcgccagggcaacggggacctgcctccagtgcccagtgcctcggacttccagccactgcgctatttggatggtgtccccagctccttccagttcttcctgcccctcggctccgggggggccctgcacctgcctgcctcctccttccttacccctcccaaggacaagtgcctctcgccagacctgcccctgcccaagcagctggtgtgtcgctgggccaagtgtaaccagctctttgagctcctgcaagacctggtggaccatgtcaacgattaccatgtcaagcccgagaaggatgcggggtactgctgccactgggagggctgcgcccgccatggccgaggtttcaacgccaggtacaagatgctcatccacatccgcacacacaccaacgagaagccacaccgctgtccgacctgcagcaagagcttctcccgcctggagaacctgaagatccacaaccggtcgcacacaggcgagaagccctacgtctgcccctacgagggctgcaacaagcgctattccaactccagtgaccgctttaagcacacgcgcacccactatgtggacaagccctactactgcaagatgcccggctgccacaagcgctacacggaccccagctcactgcgcaagcacatcaaggcccatggccactttgtgtcccacgagcagcaagagctcctgcagctgcgcccaccccccaagccgccactgcccgcccccgacggcggcccctatgtcagtggggcccagatcatcatccccaacccagctgccctctttggaggccctggcctgcccggcttacccctacccctggcccccggcccccttgacctcagtgccctggcctgtggcaacggtgggggcagtgggggtggggggggcatgggccctgggctgccaggccccgtcctgcctctcaatctggccaagaacccgctgctgccctcgccctttggggctggcggactgggcttgcctgtggtctccctccttgctggcgcagctggtggcaaggccgagggggagaaggggcgtgggtcggtgcccaccagggccctgggcatggagggccacaagacgccccttgaaaggacggagagcagctgctcccggccaagccccgatggactccccctgctgccaggcaccgtgctggacctgtccacgggcgtcaactcagctgccagcagcccagaggcgttggcccctggctgggtggtcatcccgccgggctcggtgctgctcaaaccggctgtggtgaactgagcccatcctgcggacagttgtggtgcccccccggcagctcccggcactgcccccgacgaacggaaactcttctgtgaaatagcaataatgtcctactgcccgggcagccccagcccagcccgccgggagcaaggatggtgctaggtcattcatggctggcctcccagcccccgggtggggacctggcctgtcatgcagggagagctgtgctcctgggtgctgaagcctcgctcctgtctgtcccccaccacctggccctcagcttctgagaggcttt

SEQ ID NO: 1127 - DNA, 7026 bp, human
aagagggcgtgaggagggaaggagagggaggagagagaggagagagaagggcggagtaggaggcaggggaagggggcggggcggaagagtcacgtgatccggcatggaggcggtggcggcgaccgggaggagccgccggggcagaagccgcacttgttagtgtggggggaggtgggggcgggggacgccgacaccgtcaccgtcacccagggacgccgaggagaaggcgggaggggggtgggggcgagatcaggctccgaccccccgccgaggggatgaggggagcatgggtgccaaggagtcacggatcggattcctcagctacgaggaggcgctgaggagagttacagatgtagagctaaaacgactgaaggatgctttcaagaggacctgtggactctcatattacatgggccagcactgcttcatccgggaagtgcttggggatggagtgcctccaaaggttgctgaggtgatttactgttcttttggtggaacatccaaagggctgcacttcaataatttaatagttggacttgtcctccttacaagaggcaaagatgaagagaaagcaaaatacatttttagtcttttttcaagtgaatctgggaactatgttatacgggaagaaatggaaagaatgctccacgtggtggatggtaaagtcccagatacactcaggaagtgtttctcagagggtgaaaaggtaaactatgaaaagtttagaaattggctttttctaaacaaagatgcttttactttctctcgatggcttctatctggaggtgtgtatgttaccctcactgatgatagtgatactcctactttctaccaaactctggctggagtcacacatttggaggaatcagacatcattgatcttgagaaacgctattggttattgaaggctcaatcccggactggacgatttgatttagagacatttggcccattggtttcaccacctattcgtccatctctaagtgaaggtttgtttaatgcttttgatgaaaatcgtgacaatcacatagattttaaggagatatcctgtgggttatcagcctgttgcaggggacccctggctgaaagacaaaaattttgcttcaaggtatttgatgttgaccgtgatggagttctctccagggttgaactgagagacatggtggttgcacttttagaagtctggaaggacaaccgcactgatgatattcctgaattacatatggatctctctgatattgtagaaggcatactgaatgcacatgacaccacaaagatgggtcatcttactctggaagactatcagatctggagtgtgaaaaatgttcttgccaatgagtttttgaacctccttttccaggtgtgtcacatagttctggggttaagaccagctactccggaagaagaaggacaaattattagaggatggttagaacgagagagcaggtatggtctgcaagcaggacacaactggtttatcatctccatgcagtggtggcaacagtggaaagaatatgtcaaatacgatgccaaccctgtggtaattgagccatcatctgttttgaatggaggaaaatactcatttggaactgcagcccatcctatggagcaggtcgaagatagaattggaagcagcctcagttacgtgaatactacagaagagaaattttcagacaacatttctactgcatctgaagcctcagaaactgctggcagcggctttctgtattctgccacaccaggggcagatgtttgctttgctcgacaacataacacttctgacaataacaaccagtgtttgctgggagccaatgggaatattttgttgcaccttaaccctcagaaaccaggggctattgataatcagccattagtaactcaagaaccagtaaaggctacatcattaacactagaaggaggacgattaaaacgaactccacagctgattcatggaagagactatgaaatggtcccagaacctgtgtggagagcactttatcactggtatggagcaaacctggccttacctagaccagttatcaagaacagcaagacagacatcccagagctggaattatttccccgctatcttctcttcctgagacagcagcctgccactcggacacagcagtctaacatctgggtgaatatgggaaatgtaccttctccgaatgcacctttaaagcgggtattagcctatacaggctgttttagtcgaatgcagaccatcaaggaaattcacgaatatctatctcaaaggctgcgcattaaagaggaagatatgcgcctgtggctatacaacagtgagaactaccttactcttctggatgatgaggatcataaattggaatatttgaaaatccaggatgaacaacacctggtaattgaagttcgcaacaaagatatgagttggcctgaggagatgtcttttatagcaaatagtagtaaaatagatagacacaaggttcccacagaaaagggagccacaggtctaagcaatctgggaaacacatgcttcatgaactcaagcatccagtgtgttagtaacacacagccactgacacagtattttatctcagggagacatctttatgaactcaacaggacaaatcccattggtatgaaggggcatatggctaaatgctatggtgatttagtgcaggaactttggagtggaactcagaagaatgttgccccattaaagcttcggtggaccatagcaaaatatgctcccaggtttaatgggtttcagcaacaggactcccaagaacttctggcttttctcttggatggtcttcatgaagatcttaatcgagtccatgaaaagccatatgtggaactgaaggacagtgatgggcgaccagactgggaagtagctgcagaggcctgggacaaccatctaagaagaaatagatcaattgttgtggatttgttccatgggcagctaagatctcaagtaaaatgcaagacatgtgggcatataagtgtccgatttgaccctttcaattttttgtctttgccactaccaatggacagttatatgcacttagaaataacagtgattaagttagatggtactacccctgtacggtatggactaagactgaatatggatgaaaagtacacaggtttaaaaaaacagctgagtgatctctgtggacttaattcagaacaaatccttctagcagaagtacatggttccaacataaagaactttcctcaggacaaccaaaaagtacgactctcagtgagtggatttttgtgtgcatttgaaattcctgtccctgtgtctccaatttcagcttctagtccaacacagacagatttctcctcttcgccatctacaaatgaaatgttcaccctaactaccaatggggacctaccccgaccaatattcatccccaatggaatgccaaacactgttgtgccatgtggaactgagaagaacttcacaaatggaatggttaatggtcacatgccatctcttcctgacagcccctttacaggttacatcattgcagtccaccgaaaaatgatgaggacagaactgtatttcctgtcatctcagaagaatcgccccagcctctttggaatgccattgattgttccatgtactgtgcatacccggaagaaagacctatatgatgcggtttggattcaagtatcccggttagcgagcccactcccacctcaggaagctagtaatcatgcccaggattgtgacgacagtatgggctatcaatatccattcactctacgagttgtgcagaaagatgggaactcctgtgcttggtgcccatggtatagattttgcagaggctgtaaaattgattgtggggaagacagagctttcattggaaatgcctatatcgctgtggattgggatcccacagcccttcaccttcgctatcaaacatcccaggaaagggttgtagatgagcatgagagtgtggagcagagtcggcgagcgcaagccgagcccatcaacctggacagctgtctccgtgctttcaccagtgaggaagagctaggggaaaatgagatgtactactgttccaagtgtaagacccactgcttagcaacaaagaagctggatctctggaggcttccacccatcctgattattcaccttaagcgatttcaatttgtaaatggtcggtggataaaatcacagaaaattgtcaaatttcctcgggaaagttttgatccaagtgcttttttggtaccaagagacccggctctctgccagcataaaccactcacaccccagggggatgagctctctgagcccaggattctggcaagggaggtgaagaaagtggatgcgcagagttcggctggggaagaggacgtgctcctgagcaaaagcccatcctcactcagcgctaacatcatcagcagcccgaaaggttctccttcttcatcaagaaaaagtggaaccagctgtccctccagcaaaaacagcagccctaatagcagcccacggactttggggaggagcaaagggaggctccggctgccccagattggcagcaaaaataaactgtcaagtagtaaagagaacttggatgccagcaaagaaaatggggctgggcagatatgtgagctggctgacgccttgagtcgagggcatgtgctggggggcagccaaccagagttggtcactcctcaggaccatgaggtagctttggccaatggattcctttatgagcatgaagcatgtggcaatggctacagcaatggtcagcttggaaaccacagtgaagaagacagcactgatgaccaaagagaagatactcgtattaagcctatttataatctatatgcaatttcgtgccattcaggaattctgggtgggggccattacgtcacttatgccaaaaacccaaactgcaagtggtactgttacaatgacagcagctgtaaggaacttcacccggatgaaattgacaccgactctgcctacattcttttctatgagcagcaggggatagactatgcacaatttctgccaaagactgatggcaaaaagatggcagacacaagcagtatggatgaagactttgagtctgattacaaaaagtactgtgtgttacagtaaagctaccactctggctgctagacagcttggcggtgagggagatgactccttgtagctgacatttggcaaaagcgtcactgaaaggcaagctaaatgtagttattttatcctgtggccctgaagcacaaaataaaaattctaattaaaatagttaactttaagagtagtaatcattttattttgaagtctcatacaagctctccgatagagaactttcaggcagatcccaccattagcctgtaaacaaaaggtttggcaccagccacctgggaccaaataagaattcaattgtgcttgtccagatatgaacaaatatgtagtgagtatagagtttaccataatcataacaaatattaaagatttccttggagtcagagtaaaaaacaaacaattataatgttgtctagggacgacatgatatgctacctcctttttcctgaagttttattccattatattgacaagatggagaaagcaagatcacgaaggtgtgcaaatgattcttaaggcatggacgaggatttttcaatttattttttaaactgtttccataccctttctttgtctttcttgctttttgtttttgccgttgtatttatgtttgagacacaaccagtcattggtggcaggggcatatagtggtcagtctgaaagggaggctctcttaagagctgtgtgccttccacccagagccttgtgggagacccagtagaaagaaacagcatcctgggaaatccagctaccatggccctcccagtggaggcatcttacatttaggatacttcaagtatcctcagaaatgtattctgcacccccggccccacccatgctgagggaaggggagcagttgccaatatttgcaccatcttcacatgcacctgttgcaacaagagcttctgggaaggtaagtggcattggagctagatcacgtttcacaattagtggttgttcttttctgtgtttgtcttgcactttaaaaaagagagaacacatgcaaatgaacttgcttgtgtgtatttgatggctctaagggctataaattacaaacaaaacacatcccagacattaggagttcataagtgtatttaatgaaattggtggttttaggaagtcaactttagttttgctttgtttgcatgtccactaatttttttattttgatatttgtcttttttttaaattttacagtagtcatcgaaagttatgtttctttgcttacttcatttttttctctaatcaagactggaacaaaagtataaatattatttatttcaggtagcatttttttcgtgtagttttttaatatatacttgaaggaaatgtttcaccttatttttggtctttgtttattcatttagaccctgcaagttgattctcattaattgtcagattccactaccctttcttcctcatagatagtaattaccaatgtaactaagtatttgtgttctgatatctgaggccagtaactattaatatctagttctcagagcatttggaaaggttatcttaaatggctacctaaattgaaatccttttcagaaaaaatataattgcaagtaggtaggactggcctaaattgtctaatgtaataaagtcagacaaaatgcatactttatagtttcaagattttcagtatataaaatctgtccattcccattaaaaagtggaagattttaaataatttctttacagatgttttatttaagcaggtagctcaatctactaatgttgtttgatctgtgtttgttatactggttgtaattaatttttttaattcatgaactagcagaaaatttattaaattaactattaactacattcaccttgtaaattactgtataaaacttgttgacaatgcactgactttagaaagatgttaatgtacataaatagagtgtaaataaaatagtgttgatgtaccg

SEQ ID NO: 1128 - DNA, 3957 bp, human
gcgccggggccgggtagctgctccaggcgcgcgagctaaccgagtgcggcgagggcctaccaggggcgacagggtttctctccgcaagcgcgcgatgcagcgggcggcggcgctggtccggcggggctgtggtccccggacccccagctcctggggccgcagccagagcagcgcggccgccgaggcctcggcggtgctcaaggtgcggcccgagcgcagccggcgcgagcgcatcctcacgctggagtccatgaacccgcaggtgaaggcggtggagtacgccgtgcggggacccatcgtgctcaaggccggcgagatcgagctcgagctgcagcggggtatcaaaaagccattcacagaggtcatccgagccaacatcggggacgcccaggctatggggcagcagccaatcaccttcctccggcaggtgatggcactatgcacctacccaaacctgctggacagccccagcttcccagaagatgctaagaaacgtgcccggcggatcctgcaggcttgtggcgggaacagcctggggtcctacagtgctagccagggtgtcaactgcatccgtgaagatgtggctgcctacatcaccaggagggatggcggtgtgcctgcggaccccgacaacatctacctgaccacgggagctagtgacggcatttctacgatcctgaagatcctcgtctccgggggcggcaagtcacggacaggtgtgatgatccccatcccacaatatcccctctattcagctgtcatctctgagctcgacgccatccaggtgaattactacctggacgaggagaactgctgggcgctgaatgtgaatgagctccggcgggcggtgcaggaggccaaagaccactgtgatcctaaggtgctctgcataatcaaccctgggaaccccacaggccaggtacaaagcagaaagtgcatagaagatgtgatccactttgcctgggaagagaagctctttctcctggctgatgaggtgtaccaggacaacgtgtactctccagattgcagattccactccttcaagaaggtgctgtacgagatggggcccgagtactccagcaacgtggagctcgcctccttccactccacctccaagggctacatgggcgagtgtggttacagaggaggctacatggaggtgatcaacctgcaccctgagatcaagggccagctggtgaagctgctgtcggtgcgcctgtgccccccagtgtctgggcaggccgccatggacattgtcgtgaaccccccggtggcaggagaggagtcctttgagcaattcagccgagagaaggagtcggtcctgggtaatctggccaaaaaagcaaagctgacggaagacctgtttaaccaagtcccaggaattcactgcaaccccttgcagggggccatgtacgccttccctcggatcttcattcctgccaaagctgtggaggctgctcaggcccatcaaatggctccagacatgttctactgcatgaagctcctggaggagactggcatctgtgtcgtgcccggcagtggctttgggcagagggaaggcacttaccacttcaggatgactatcctccctccagtggagaagctgaaaacggtgctgcagaaggtgaaagacttccacatcaacttcctggagaagtacgcgtgaggacgcctgagccccagcgggagacctgtccttggctcttcctcccaatgcccgtcaggctgaactcgcctcccccgtgactctgcctcgggcctcgcagaggccgctggtcacttcgtcatcattttgcccctggagacgtctttctttgtgccttgatgttgagagcgcctctcttttgagcaaacaagcattctatatgcaaccagagtagaggggacctgctcagcaggtgtgaccagggttctctgaatctgttattgtttttgcttctggaaagttcatttggggtttacaacaactaggatgtgttgggtgagatgtttcagatctggagaaatgagcaggtgtcgggaaatgtgtgacttaaccgtggtgagggctggaaatccaaactcaccaccatgatctgtgaaataaagcccttagcggtgtgaagcatccggtcctttgaacagaagggcctggaaggcccctggggctgagaaagggtccgcccggtggcctggaggcaggcgccgggagcgcagtagcacgtggactgggcaggatgttgcactagcttggggtagatgctgggggctgcggccacggtcagagggccccactgtgaggcgtgggtgtgagccaggctgcaggaggaactgggcctccgcttcccagcaacgcagccaggcctgagaattctgtgcgcccggcgggctttgggaatgaggggttcccttgaacatgcgtaggctggaaccccgtctgagaggtctccctgaatttcagtgacacatagtgcagcccggcagtgtcccacttccgtggagagagccgctggaatggtgtggacccatcccgcgggtgaccggtgcctgttctcccctgaccgagcctgtgagcacatcgccccctgctggcgacagcggggaaatgagggctgaaaatatcctccccacaagggcaatccccgggacctgccgagcagccaaggccctgtcctttcttgaatggtggcgagctgaatctggtcggtttcctagcttttaggtggtaaaagtgcctggcagcttggctgccgtggaggagtcagtcgtggttggaggttcattgccgtgctttcatgcagagtgttttgccttcatgttagcttccggctcccctcccaggctgcagactctgacctgtggcatcaggcttctcccagtacaggagggtgccatcccccagcatgcggcttctctgccattagcagccctgggcgggccgaccacactcgaggctgcggtgctacgggcttagccctcgcctccctcactgggagcttccccatcctccctgccttccccagtgggaagttagggaagctcaggagcctgggaccccgcatgtcccaaaatgggattggagaagctggagagaaagcagaagaggccgaggagtgaggcagcagcctctatgcttgatttccacaccgggtccgtgcagaggaaacagaaactcccaactgtccttacccaccgacatcacagcccctatgaagaaagtagccacaatctcaaataacaaaagggaatgttctaaaactttttcttccttaaaaaatggagaaaattgcacttgtgcttgctgtgtggtatataaaccaggattagtcccagggtcgtgaggtttctggtgaaaaggttaaatcgtagaagctagtatattttttatatttttgtaacaattgcttttttcatgggggaggcggggttagtatttatagtcctaacaagtccagtaattttttataaatcttcagattataaacagcccctaaaaactttacaacgtttacacagttttttaaaaagagactgtatacacttgatttgctttcaaaataaataaggtcagctagtctaggaggttaacgtcgggtaggaatgctgatcatgataggtttggttttctacagattctgttccggtgcctttcctatccaggcaccacctgagaaagttgtcatttgaggtcgcacttggaagttacatctgtgaagtttctgtcattcgtccagatctgtgtgtgtagcatgtgctgaggaagcacgtgctgggctgtgcctcagacagtgcatcaccgggcacccagaggcttgcctggctattcctgttctggtgtgtgtggagtgttggggaggaacagatgcagatcaacctgtggctgttttcccgtctaggttctcacaggtatctcctgacagaggtacttaacaatggctctgctggaaatttctataaataaaatgtccaaaatggaaa

SEQ ID NO: 1129 - DNA, 1088 bp, human
ccgaagcttccggtggccggcttagttaggagctatggctaaacatcatcctgatttgatcttttgccgcaagcaggctggtgttgccatcggaagactgtgtgaaaaatgtgatggcaagtgtgtgatttgtgactcctatgtgcgtccctgcactctggtgcgcatatgtgatgagtgtaactatggatcttaccaggggcgctgtgtgatctgtggaggacctggggtctctgatgcctattattgtaaggagtgcaccatccaggagaaggacagagatggctgcccaaagattgtcaatctggggagctctaagacagacctcttctatgaacgcaaaaaatacggcttcaagaagaggtgattggtgggtggccccttcctccccccaacatcagtctgctgcagctgccagaaaacatgcctactactaccagcagaaagggagcagagcccagagcatcaccaggagtgcctgctagtgtactggcagcttgccaccccctcctctcccttcacccagacacgtggtagggatggaaaaggattcttcacagagcactctggcacaccatatcggagaaaacttgatagattagttaatggtttttcttgaattcgagaagcaaagatctgttctccatattggtatgttctccctcaaccaagatcttctaaaaagaaataatattttagtcttctgcttgaggaactgactgtgaagcgacgcccagtgaaaaacatgttcttgcagcagctctggtggcagctgtccttgaggaacctttggtgtgtggtgggaagctatcagaacaagaaatgtaggcatttcccgttttttttggggggggggtgggggggcagggctctgccctcttgaaaggcatttacttgtttaacacttgtccagctacagtggggtacagtagctggctattcacaggcatcatcatagcccactagtctcatattattttccttttgagaaattggaaactctttctgttgctattatattaataaagttggtgtttattttctggtaaaaaaaaaaaaaaaaaaaaaaaaaaaaaaaaaaaaaaaaa

SEQ ID NO: 1130 - DNA, 2798 bp, human
ccgcgagccgcccggcactcccgcagtccagccggctcctctagcccggccacggctccgctgcgggccacccaggattactcgcgtctggctccaggcgccgagaaggcgcgctgggcgcccgtggccgccgcgccagctcctcctcctcccgctgctcctgctcccggggcgagcgcgcagccccgagcccgccccgcgcctcccggagccctcccccccgctgctcccatgcgcgcgggtgggtcatgagcacagcgccctcgctttctgccctaagaagcagtaagcacagcggcggcggcggcggcggaggcggaggcggcggtgcagaccctgcctggaccagcgcgctctctggaaatagctccggccccggcccaggctcgtccccggccggcagcaccaagccttttgtgcacgccgtgcccccctctgaccccctgcgccaggccaaccgcctgccaatcaaggtgctgaagatgctgacggcacgaactggccacattttgcaccccgagtacctgcagcccctgccttccacgccggtcagccccatcgagctcgatgccaagaagagcccgctggcgctgttggcgcaaacatgttcgcagatcgggaagcccgacccctcgccctcctccaaactctcctcggttgcctccaacgggggcggcgcgggcggtgccggcggcggtgctgcgggcgacaaggacaccaaatcgggccccctgaagctgagcgacatcggcgtggaggacaagtcgagtttcaagccgtactccaaacccggctcggataagaaggagccgggaggcggcggtggaggcggtggcggtggcgggggcggcggcgggggtgtttcgtcggagaagtcgggattccgggtaccgagcgccacctgccagccattcacgcccaggacaggcagcccgagctccagcgcctcggcctgctcgccgggaggtatgctgtcctcggccgggggtgccccggagggcaaggacgacaagaaagacaccgacgtgggcggcggtggcaagggcaccgggggcgcctcggccgaagggggacccacggggctggcacacggccggattagctgcggcggcgggattaatgtggatgtgaaccagcatccggatgggggcccgggaggcaaggctctgggctcggactgcggcggttcatcgggctccagctccggctccggccccagcgcgcccacctcctcctcagtgttgggctctgggctggtggctcccgtgtcaccctacaagccgggccagacagtgttccctctgcctcccgcgggtatgacctacccaggcagcctggccggggcctacgccggctacccgccccagttcctgccacacggcgtggcacttgaccccaccaagccgggcagcctggtgggggcgcagctggcggcggccgcggccgggtctctgggctgcagtaagccggccggctccagtcctttggccggagcgtctccgccgtccgtgatgacagccagtttgtgccgggacccttactgcctcagctaccactgcgctagccacctggcaggggcggcggccgccagcgcttcttgcgcacatgatccggctgctgcggctgcggcgctgaagtccggatacccgctggtgtaccccacgcacccgctgcacggtgtgcactcctcgctaacggccgccgcggctgctggcgccacaccgccctccctggccggccaccccctctacccctacggctttatgctccctaacgacccactcccccacatctgcaactgggtgtcggccaacgggccgtgcgacaagcgcttcgccacgtccgaagagctgctgagccacttgcggacccatacggcatttcccgggacagacaaactgctgtcgggctaccccagctcgtcgtctctggccagcgctgccgcggccgccatggcttgccacatgcacatccccacctcgggcgcaccgggcagccctgggacgctggcgctgcgcagcccccaccacgcgctgggactcagcagccgctaccacccctactccaagagcccgcttcccacgcctggcgcccccgtgccggtgcccgccgccaccggaccgtactactccccctacgccctctacggacagagactgaccaccgcctcggcgctggggtatcagtgagggcggccgggagggcgagcgagggagaggagggagagggggaggggaggagtccagggagaggcgggatcacggcccaggctgctgacacccgcgcgtggggaggactcgggccacgaaaggaaagaaatgtataccgtatctatctacccgacagcagcgaccgagacccggtgggacactccccttctccccactttcacctccccacccaaactttataaaagttgaaaaaatatcatttgactttttatagaaaaaaaaaggaaaaaataattgagaaagtgttcatctgaggactgcatcggtggacactggtatttatttatgttagctccaagcggaccggtggttcaaaagtgcattatttagtttgagctctgtaggtaaaaaggaggtgggaaaaattttaaaacttgagggtaaaaatgtggaaaacaaaccctcccatcccttgtagattataaataaaagcaaaaccgccacagaactagaggtcttctctttaatgttactttaaaattgctatgattgtattgtacgttatttaatgtctgattgaaacacaaatttacatgcatgtttgttacaaaaaaaaaaaaaaaaaaa

SEQ ID NO: 1131 - DNA, 3597 bp, human
ggagcaggcgtgcgggccgtgagcggcgccagagggtacctggctctgtggaggggccctctggtatgtgtgtccctgtccttctggggcgtggatggtgcctgggacccagctggcaaccagttgaagacgttctccttggaagctcttggccctgaggactttgcctggggcattggccctgccatggcgttccggagggccgagggcacgtctatgatccaggccctggccatgacggtggccgagatccccgtgttcctgtacacgacgtttgggcagtctgcattctcccagctacggttgacgccaggcctgcggaaagtcctctttgccacggccctggggactgtggccctggccctggctgcccaccagctgaagaggcgacggaggaggaagaagcaggttggtcccgagatgggaggggagcagctgggcacggtgcccctccctatcctcttggccaggaaggtcccttcagtgaagaaaggatactccagccggagagtccagagccccagcagcaagagcaacgacaccctgagtggcatctcttccattgagcccagcaagcactcgggctcctcccacagtgtggcctcgatgatggcagtgaactcatccagccccacagccgcgtgctcgggactatgggatgccagagggatggaggagtctctgaccaccagcgacggcaatgcagagagcctgtacatgcaaggcatggagctgtttgaggaagctctgcagaagtgggagcaggcactaagcgtgggccagcggggggacagcggcagcacccccatgcccagggacggcctccggaacccagagactgcatcagagccactgtctgagccagagtcacagcggaaggagtttgcagagaagctggagtccctgctgcaccgtgcctaccacctgcaggaggagttcggctccaccttccccgcagacagcatgctgctagacctcgagaggaccctcatgctgcccctgaccgagggctcgctgcggctgcgggcggacgatgaggacagcctgacttcagaggattccttcttctccgccaccgagctctttgagtccctgcagactggagattacccgatcccactctccagacccgccgctgcctatgaggaggccctgcagctggtgaaggaggggagagtgccttgccggaccctcaggacggagctgctgggctgctacagtgaccaggactttctggccaagctgcactgtgtgcggcaggccttcgaggggcttctggaagacaagagtaaccagcttttcttcgggaaagtgggccgacagatggtgacaggcctgatgaccaaggctgagaagagccccaaaggcttcctggagagctacgaggagatgctgagctatgccctgcggcccgagacctgggccacaacacggctggagctggagggccgaggggtggtatgcatgagcttcttcgacatcgtgctggacttcatcctcatggacgccttcgaggacctggagaaccctccggcctcggtgctcgccgtcctgcggaaccgctggctgtcagacagcttcaaggagacggccttggccactgcttgctggtcggtcctgaaagccaagaggaggctgctgatggtgcctgatggcttcatctcccatttctactccgtatcggagcatgtgagccctgtcctagccttcggcttccttggacccaagcctcagcttgctgaagtctgtgctttcttcaagcaccagattgtgcagtacctgagggacatgttcgacctggacaatgtgcgctacacgtcactgcccgcgctggcagacgacatcctgcagctgtcccggcgccgcagcgagatattgctggggtacctgggggtgcccgcggccagcagcgcaggcgtgaatggggcgctgccccgagagaatgggcccctgggggagctgcagtagaggcggcacgggctggggggtggcagagagaaggctcctcctcccttccctgggttggtatctgacagctgtggtggctgagggccgttgcccctgactttgccccacccccatcatctgggagtccccaaggcccagaggggacatttccatggagaagaacggttcctgggggaagcagaggccaggaccagtggggcctgtgggagagaaaggctgtgagagagggggttgttgtggagaattgggacaggcagagccaggatgccccaggtgggggaccccaaaacctcccatcgctccagggctgctgacaagggtgctgggagggtggaggtgaaggatggggcctagagccctgtggtgaaggtcacagtgtcctgagctagaagccacctgtggctatatggtctcagcatccagctggcctgtcctgatgccctccccacctcaaccgccttctcagagagtttgcaactccagagaaggagagtggggccaccttagtgggcagcaggcctgggccatccagagatggggcagaggtgggcctcccactcctgtgctctcttctgagcaggaactgggcccttgacagtgtcctttgacattccctcgccctaccaaagatcgtcttttctcctcccacctctgtcaccaccaaagacgggcggaggtggggctgggccctcctgcccccgcccatcccccttccatgagcccagacctccctgggtggtgctaggctctgagctgggggctcagaccagggatcgctcaggcccctgtcacctgtgggcccggggaccacttgggggaggtcagaggatgtatgtggccggaccagcttccccaccttcattaggacaagaaactgcccagcactttgccttcagttcaacgcacaaacgctcctggggcctcatgggggcagagcctcccctgggcctgcagagagtcctgttagcagcgacgtccccccgccgcggggtcctgtcagcccggcagtgtcttctcagtgtcttcacctgagcgagtgtctgtggccccaacgcgttctgctgtggctctgccctttccaggttgagaggcctgcaggagaaacacactcccctcctgggtttccacactcaggaggtcagaggactggctcctgtgaccagggcccctctcccctgaatgggaaaggggtctggggatgggagggcgcaccacagagaggagatgatgctgggtgtggcccatcttctgtgggccccttcccagacaccggatccatgggcactaacccgcctcccaggctgatgcccggaggcagcttcctgggcaggagggttccatgggcactaacccacctcccaggctgatgcctggaggcagcctccagggcaggaaggaccctgtgctccccgccccccatcctgacatcctgttcttttgcacttaccctgtgctgtgaatgtaacagtgggccttggccccgcccactctgatttgcattttcatttgtgtttgtttacacatccatgcactgcctgtagcagtcgattgtcacagcttcgacttttggatggtagagtgtgtgcactgactgtgagtcgaataaacaattgagacgaaaaaaaaaaa

SEQ ID NO: 1132 - DNA, 3324 bp, human
aaggcgcgagcctgcgttttccggccagaggacatgatgcagggggaggcacaccctagtgcttcccttattgacagaaccatcaagatgagaaaagaaacagaggctaggaaagtggtcttagcctggggactcctaaatgtatctatggctggaatgatatatactgaaatgactggaaaattgattagttcatactacaatgtgacatactggcccctctggtatattgagcttgcccttgcatctctcttcagccttaatgccttatttgatttttggagatatttcaaatatactgtggcaccaacaagtctggttgttagtcctggacagcaaacacttttagggttgaaaacagctgttgtacagactacgcctccacatgatctggcagcaacccaaatccctcccgctccaccttccccttcaattcagggtcagagtgtgttgagttatagcccttctcgttcgcccagtaccagtcccaagttcaccaccagctgtatgactggttacagccctcagctgcaaggtctgtcctcaggtggcagtggttcttatagccctggagtgacctactcgcccgtcagtggttataataagttggcgagctttagcccctctcctccttctccgtaccctaccactgttggaccagtggagagcagtggattgagatctcgctaccgttcttcacctaccgtctacaactcacctactgacaaagaagactacatgaccgacctacgaactttggatacttttctcagaagtgaagaggagaaacagcatagggttaagctggggagcccagattctacctctccttccagcagtcctactttctggaactatagtcgttctatgggggattatgcacaaactttaaagaagtttcagtatcagcttgcctgtaggtctcaggccccatgtgctaacaaagatgaagccgatctcagctctaaacaagccgcagaagaggtctgggcaagagtggctatgaatagacaacttcttgatcatatggattcatggacagctaaatttagaaattggatcaatgagacaatattagtgccacttgttcaagagattgagtctgtcagcacacagatgagacgaatgggttgtccagagctacagataggagaggctagtattactagcttgaaacaagctgccctggttaaagcgcctctcattccgactttggacacaatcgttcagtatctagaccttactccaaatcaggaatacttgtttgaaaggatcaaagaactatctcagggaggttgtatgagctcatttcgatggaacagaggtggcgacttcaaaggacgaaagtgggatacagacctgcccaccgattctgctatcatcatgcatgtattttgcacctaccttgattccagattacctccacatccgaagtatcccgacggaaaaacttttacttctcagcactttgttcagacaccaaataaaccagatgttacaaatgagaatgttttttgcatttatcagagtgctatcaaccctccccattatgagctcatctaccagcgtcatgtatacaacctgccaaagggcagaaataatatgtttcatacattgttgatgtttctctacatcataaagaccaaagagtcaggaatgcttgggagagttaatcttggtctatctggtgtgaatatattgtggatctttggcgagtagcaagtcatatatttaattctgacatttagactatttcactgaaccagaagtcgaaactaaacatctctgagccactgactcttctgaaataaaatacacatgggtgtatgttacagactctttagatttaacagaaaatgtagctgttatgaaatgtaattgtaaaaatatgtcccgtatcttctatatcgagacattgcctttaattttatatcgcttttcagaaatttcagttgactacaaaactgcaacccttcggatttttattgactcaaaatagtgccattccccttaatgaaatagattttgagtctttttttcattgtaacccccaaatgagaatcatctacctgattcttgtaccaaaaaaaaatttttttcagtcttttttttttttagagagggtctctgtcaacgcagactggagtgcagtggcacgatcttagctcactacaacttctgcctcccaggctcaagcaattctcctgcctcagcctcctgagtagctgggattataggtgcgagccactgcgcccagcctcagttattttatttaacagtgtaagtacttagaaagtaagaaaattgctgatttagttttttttttttttttttttttaatgtttccccagcattctgcaagttaggccaaagcccacattcaaagaaatgagattaactcttaagtaatgtattaagtttatgtatattttaaaatattattaaaggaggtttgaaagtattgacatttaaaaagtcaacacttagattaaatttagctggtagttttaatttgggttttagttaagagtgtgaggacatcaggaaaactgtttactactttggttttagcagctcagttttactattccataatgtgttatttttaaagttctctttttaagatcacagtgatatcctatcttcaaattttttaaatatgttcaaaatatctggagggtgagaagttaccaagtttgtatgttttgtttgactcaccatctttattttctgtatatgtagtagctggcaattgcatatattttcttgattaacatattagagactgcttccatcatcttatgtaaacctggaaacagctgaaactagtcttttctgaagaaccgtgtatcagtgttagatgtgcatcccgttttgtcattccctcagactttgaatacagtcattactctctggaagagaaatgtaagtatattttttgttatctgcagtatggtttaacatgtattaataatacacatatgcagactcactaaagtatccccagtaattagtaaattccaaatttaagtcagtacagttctgtatttgtaaattctgtctttcaaaaagttgttcgtgtttttaaaagttgatgtccaaaggaaaggagcttcttttaagtacttttggtgtatgttgaatatttatttgctatgatattctagaagaaaatatcaaacatgttaaatataagaacatgttaaaatttaaatttgctatttcaaaagttactgaggatgtcttggaataacaattgtcatgctgttaaactagttgcatatacttcattaaaagcaccatggagaaacattttaacaatgc

SEQ ID NO: 1133 - DNA, 1835 bp, human
gtggtgaggcctacagaagcggccttcagctggaccttggtctccccgccggacttcgagggtgtcatcgccgcccctgttgggggtgagcgccgcgcggctgcagcatgcctcacaggaagaaaaagccctttatagagaagaagaaagctgtgtcttttcacttggtccaccggagccaacgagatcctttagcagcagatgagagtgcaccccagagggttctattgcccacacaaaaaatagacaatgaagaaaggcgagcagaacagaggaagtatggagtgttctttgatgacgactatgactacctgcagcacctgaaggaaccatctgggccttcagagcttattccctcaagtaccttcagtgcacacaacaggagagaggagaaagaagaaacgctagtaattccaagcactggaattaagttgccttcatcagtgtttgcttcagagtttgaggaagatgttggattgttaaataaagcagctccagtttcaggacctcgactggattttgatcctgacattgttgcagctcttgatgatgattttgactttgatgatccagataatctgcttgaggatgactttattcttcaggccaataaggcaacaggagaggaagagggaatggatatacagaaatctgagaatgaagatgacagcgagtgggaagatgtggatgatgagaagggagatagcaatgatgactatgactctgcaggcctattgtcagatgaagactgtatgtctgtgcccggaaaaactcacagagctatagcagatcacttgttctggagtgaggaaacaaagagtcgcttcacggagtattcgatgacttcctcagtcatgaggagaaatgaacagctgaccctacatgatgagaggtttgagaagttttatgagcaatatgatgatgatgaaattggagctctggataatgcagaattggaaggttctattcaagtggacagcaatcgcttacaggaagttttgaatgactactataaagagaaggcagagaattgtgtaaaattgaatacccttgaacccttggaggatcaagacctgccaatgaatgagcttgatgagtctgaggaggaagaaatgattactgtagtccttgaagaagccaaagagaagtgggattgtgaatctatttgtagtacatactcaaatttatataaccatccacagcttatcaagtatcaaccaaagcccaaacaaattcgaatatcttctaaaacaggaatacctctcaatgtcttaccaaagaaaggactcacagcaaagcaaactgaaagaatacagatgattaatggcagtgatcttcctaaagtatcaactcagccacgttctaaaaatgaaagcaaagaagataaaagagcaagaaagcaagctataaaagaagagcgcaaggaacgaagagtggagaagaaagctaacaaattagcatttaaactggagaaaagaaggcaagaaaaagagctgctgaacttgaagaagaatgttgagggtctaaagctatagacagtggagcatacagggcaaggcactttattaggggctcctcatctttggttattgactagaaacttcagaaagacaaaactgtttgccatttttactggcagataagaggaaaatacaatatttgtattatttttatactagtaagtgtcccctgccaaccatcttgtaaatattgtaatactttaatttttaatattataagcttacatttgctctgaagtaaatgacttcatgaatgtgaaatgtttgataaattaaaggaaaatatcttcataaaaaaaaaaaaaaaaaaaaaaa

SEQ ID NO: 1134 - DNA, 3949 bp, human
gtggagggtcccggccgggagccgcggaaagagtagggctccccagacaacggggtccgacgagcagttgggcacgggctgagtccgcctgccggcagaatgtccctggctgcttattgcgtcatctgttgcagaagaataggaacctctacttccccaccaaaaagtggcacacactggagagatatcagaaatataataaagtttactggatcacttattttaggaggttctttatttcttacatatgaagttctggccctgaagaaggctgtgacattagatactcaagtggtagaacgagaaaaaatgaagtcatatatatatgtgcacacagtttctttagataaaggagaaaatcatggtattgcctggcaggcaagaaaagaacttcacaaagcagtaagaaaagtattggcaacatcagccaagatactgcggaatccatttgctgatccttttagtacagttgatatagaagatcatgagtgtgctgtgtggctgctcctacggaagagcaagtcagatgacaaaaccacgcgactcgaggctgtgcgggaaatgtcggagacccatcactggcatgattaccagtataggataattgctcaagcctgtgatccgaaaactcttattggtttggcacgaagcgaagagagtgatcttcgcttttttctcctaccacctcctttgccatctttaaaagaagattcttccactgaagaagagctcagacagttgctggcttccttacctcaaacagagctagatgagtgtatccagtattttacatctttggctcttagtgaaagcagtcagagtctagctgctcagaagggtggtttatggtgttttggaggaaatggacttccttatgctgaaagttttggagaagttccttcagcaacagtggaaatgttctgtttagaagctatagtaaaacattctgagatatccacacattgtgataaaatcgaagcaaatggaggcctgcagctacttcagaggctgtaccgacttcacaaggactgccctaaagtacagagaaatataatgcgtgtcattggaaatatggctttgaatgaacatcttcattcttctatagttcgctcaggctgggtttccatcatggcagaagcaatgaaatctccccacattatggagtcctcacacgctgccagaatcctggcaaatctagaccgagaaactgtgcaagaaaaatatcaggatggcgtatatgtgctgcatccccaatatcgaacaagtcagcccattaaagcagatgtcctttttattcatggccttatgggagcagcattcaaaacatggcgccagcaggacagtgagcaggctgtaattgaaaaacctatggaggatgaagacagatatacgacgtgctggcccaagacatggttagcaaaagactgtcctgctctccgaattatatctgtggagtatgacaccagcctcagcgactggagagcaaggtgccctatggaaagaaagtccattgcattcagaagcaacgaacttcttaggaagctcagagctgctggtgttggggataggccagtggtttggatatcacatagcatgggaggtcttcttgtcaaaaagatgctgttggaagcctctacgaagccagaaatgagtactgttatcaacaataccagaggaataattttttatagtgtccctcatcatggatcacgtttggctgaatacactgttaatattcgctatcttctcttcccctcgttggaagtcaaagaactcagcaaggattctcctgcacttaaaacactacaagatgactttctggagtttgctaaagacaaaaacttccaggtgctgaattttgtggaaacactaccaacctacattggcagcatgattaagctccatgtggtacctgtggaatcagcagatttaggcattggagatctaattcctgtggatgttaaccatttgaacatttgtaagccaaagaaaaaggatgcttttttgtaccagcgtactttacaattcattcgtgaagctttagccaaagaccttgaaaactaacagttgtgctcttccagttttcatatgtgaattcagtgcaagaaacttggtgttctgtttcttcttttaagctctatgcaatcatgcaaacatagtgatcatagcgtcaacatggtctggagtgtgttgcagactacagaacattgttctcccttcaagcgctgtaaagcaccaacccggaagtggcaggcacagaaggaagggctggattgggcccctttggtgtaaagaagtccctgtgtgctgctttatggttcgcagtgttgggcttggtgactggagcaaagctgctgtgagagagtgtcctttcccatctgtgactttcctggtgcatccaggaggggcacggcaggttctgaggtaactcaacttaccataaaaatgccattaagagagtacctaaaatggagagaagaatgaactagaacattcaagactcttttacttctgggtattgatttgctgtacatttttaaagtttgagtttttagctcagttctaccttttatctgacacattattactagtgttaactttgttagacttattgtcatgtctgggtcagttccttgtatctattttcgtattcctgagaacaaatctttttcttagaaaaattctagcttataataattcttttcagactgtagctgcctatgcttggaatttgtcctagataaggataaagtagctaatccattattgatcacagtatgaagtaaaactattctaagccattatatgaattagcaattcttagtatcaagattctcagattctctttggctaaataaacctttcttcttccttgctcatttgcaagtggtattaattgacctctatagcatgtgagtagtagataatcatgtcgatgacctttttttctttagagtaacagcattattgagatataatttacataccataagattcacccttttaaattatacaattcatttttgttttgttttgtttgtttagagacagggtctgactctgttgcccaagctggagtgcagtggcatgatcatagctcattgtaacctcaaactcctgggctcaagagatccttttgcttcagcctcccaagcagctaggactacaggcacatgccaccacacttgggtaattaaaaaataaataaatacttttttgtagagacagggtctcactgtgttgcccaggtctcaaactcccgatctcaagccaccctcccaaaatgctgtgattataggccagagccattgttcccaggctcaattcattggtttttagtatagttcactgagttgtgcaacatcattgctatttaatttcaggctatttcatcatccccaaaagaaccccatacccatgagcagtcagttcccacctctgctttcccaagcctgcggtaaacactaatctgttttctgtctctatggatttgggaattttatgtaaatggaatcatacaatatgtggccctctctgccttcttccttctattagcatgttttcaaggttcattcatgatatagcatgtatcagtactacttcatttctttttatggccgaaattactccattgtatgatatgccatgtttctttatccattcatcagctgatggacatctaggttctgttcatttttgtctatgataaataatgctaccatgatcatttgtgtacaaatttatgtgtggatagatgtttttgattctcttgggtggaattgctggtcaaatggtaagtctatgtttaaattttgaagatggtgaacttttgtagaatgagatagtcgaagctaaaactggagtatggcatctgaaggtaaatggctcatcaataaactcgatatcaacaattaaaaaaaaaaaaaaaaaaaaaaaaaaaaaaaaaaaa

SEQ ID NO: 1135 - DNA, 2326 bp, human
gtgaaaagaggactctcaggggctcacaggggctctcactgctggttggccctgccctcccttccccctcagcagggtgcccggaagctggaaccttgttatctgggtaattagtttcagaccctgcactgaggccggccaggtctcggggctgcctcccataggttgtgcaccctgaccccgagagggaggcgaggcgctgcttgtcgacagctagaggctggcctggggagcaggtttggggtgccctcccacactgccctccctgccccggcccatgccccccagggctgcctgggcctggttattgtgtggggcctcctgacccagccaagggcacgaagctctgggaaggggatgcccccgagggtgccagtccagctagctgccccacccctcaggcccagcctggcccccaagctccccactctggtgccccgagcagccctgtgggcaagcagccgccgccatggccgagcacctggagctgctggcagagatgcccatggtgggcaggatgagcacacaggagcggctgaagcatgcccagaagcggcgcgcccagcaggtgaagatgtgggcccaggctgagaaggaggcccagggcaagaagggtcctggggagcgtccccggaaggaggcagccagccaagggctcctgaagcaggtcctcttccctcccagtgttgtccttctggaggccgctgcccgaaatgacctggaagaagtccgccagttccttgggagtggggtcagccctgacttggccaacgaggacggcctgacggccctgcaccagtgctgcattgatgatttccgagagatggtgcagcagctcctggaggctggggccaacatcaatgcctgtgacagtgagtgctggacgcctctgcatgctgcggccacctgcggccacctgcacctggtggagctgctcatcgccagtggcgccaatctcctggcggtcaacaccgacgggaacatgccctatgacctgtgtgatgatgagcagacgctggactgcctggagactgccatggccgaccgtggcatcacccaggacagcatcgaggccgcccgggccgtgccagaactgcgcatgctggacgacatccggagccggctgcaggccggggcagacctccatgcccccctggaccacggggccacgctgctgcacgtcgcagccgccaacgggttcagcgaggcggctgccctgctgctggaacaccgagccagcctgagcgctaaggaccaagacggctgggagccgctgcacgccgcggcctactggggccaggtgcccctggtggagctgctcgtggcgcacggggccgacctgaacgcaaagtccctgatggacgagacgccccttgatgtgtgcggggacgaggaggtgcgggccaagctgctggagctgaagcacaagcacgacgccctcctgcgcgcccagagccgccagcgctccttgctgcgccgccgcacctccagcgccggcagccgcgggaaggtggtgaggcgggtgagcctaacccagcgcaccgacctgtaccgcaagcagcacgcccaggaggccatcgtgtggcaacagccgccgcccaccagcccggagccgcccgaggacaacgatgaccgccagacaggcgcagagctcaggccgccgcccccggaggaggacaaccccgaagtggtcaggccgcacaatggccgagtagggggctccccagtgcggcatctatactccaagcgactagaccggagtgtctcctaccagctgagccccctggacagcaccaccccccacaccctggtccacgacaaggcccaccacaccctggctgacctgaagcgccagcgagctgctgccaagctgcagcgacccccacctgaggggcccgagagccctgagacagctgagcctggcctgcctggtgacacggtgaccccccagcctgactgtggcttcagggcaggcggggacccacccctgctcaagctcacagccccggcggtggaggctcccgtggagaggaggccgtgctgcctgctcatgtgaggctgttgctcagcatgcaggggccctgtcgcgggcacagcccaaggctgcctccccacggtgcgtgccctggtgctgcgggtgcagcacggaaaccccggcttctactgtacaggacactggcccctctcaggtcagaagacatgcctggagggatgtctggctgcaaagactatttttatcctgcaactcttgataaagggctgttttgccatggaaaaaaaaaaaaaaaaaaaaaaaaaaaaaaaaaaaaaaaaaaaaaaaaaaaaa

SEQ ID NO: 1136 - DNA, 1835 bp, human
gtgcagttgcggctccagggccatggcggaggagcagggccgggaacgggactcggttcccaagccgtcggtgctgttcctccacccagacctgggcgtgggcggcgctgagcggctggtgttggacgcggcgctggcgctgcaggcgcgcgggtgtagcgtgaagatctggacagcgcactacgacccgggccactgtttcgccgagagccgcgagctaccggtgcgctgtgccggggactggctgccgcgaggcctgggctggggcggccgcggcgccgccgtctgcgcctacgtgcgcatggttttcctggcgctctacgtgctgttcctcgccgacgaggagttcgacgtggtagtgtgcgaccaggtgtctgcctgtatcccagtgttcaggctggctagacggcggaagaagatcctattttactgtcacttcccagatctgcttctcaccaagagagattcttttcttaaacgactatacagggccccaattgactggatagaggaatacaccacaggcatggcagactgcatcttagtcaacagccagttcacagctgctgtttttaaggaaacattcaagtccctgtctcacatagaccctgatgtcctctatccatctctaaatgtcaccagctttgactcagttgttcctgaaaagctggatgacctagtccccaaggggaaaaaattcctgctgctctccatcaacagatacgaaaggaagaaaaatctgactttggcactggaagccctagtacagctgcgtggaagattgacatcccaagattgggagagggttcatctgatcgtggcaggtggttatgacgagagagtcctggagaatgtggaacattatcaggaattgaagaaaatggtccaacagtccgaccttggccagtatgtgaccttcttgaggtctttctcagacaaacagaaaatctccctcctccacagctgcacgtgtgtgctttacacaccaagcaatgagcactttggcattgtccctctggaagccatgtacatgcagtgcccagtcattgctgttaattcgggtggacccttggagtccattgaccacagtgtcacagggtttctgtgtgagcctgacccggtgcacttctcagaagcaatagaaaagttcatccgtgaaccttccttaaaagccaccatgggcctggctggaagagccagagtgaaggaaaaattttcccctgaagcatttacagaacagctctaccgatatgttaccaaactgctggtataatcagattgtttttaagatctccattaatgtcatttttatggattgtagacccagttttgaaaccaaaaaagaaacctagaatctaatgcagaagagatcttttaaaaaataaacttgagtcttgaatgtgagccactttcctatataccacacctccctgtccacttttcagaaaaaccatgtcttttatgctataatcattccaaattttgccagtgttaagttacaaatgtggtgtcattccatgttcagcagagtattttaattatattttctcgggattattgctcttctgtctataaattttgaatgatactgtgccttaattggttttcatagtttaagtgtgtatcattatcaaagttgattaatttggcttcatagtataatgagagcagggctattgtagttcccagattcaatccaccgaagtgttcactgtcatctgttagggaatttttgtttgtcctgtctttgcctggatccatagcgagagtgctctgtattttttttaagataatttgtatttttgcacactgagatataataaaaggtgtttatc

SEQ ID NO: 1137 - DNA, 3516 bp, human
agtccgccgtccgccctccgcgcccgcgccgctagcatgaccgacgcgctgttgcccgcggccccccagccgctggagaagaagaacgacggctactttcggaagggctgtaatccccttgcacaaaccggccggagtaaattgcagaatcaaagagctgctttgaatcagcagatcctgaaagccgtgcggatgaggaccggagcggaaaaccttctgaaagtggccacaaactcaaaggtgcgggagcaagtgcggctggagctgagcttcgtcaactcagacctgcagatgctcaaggaagagctggaggggctgaacatctcggtgggcgtctatcagaacacagaggaggcatttacgattcccctgattcctcttggcctgaaggaaacgaaagacgtcgactttgcagtcgtcctcaaggattttatcctggaacattacagtgaagatggctatttatatgaagatgaaattgcagatcttatggatctgagacaagcttgtcggacgcctagccgggatgaggccggggtggaactgctgatgacatacttcatccagctgggctttgtcgagagtcgattcttcccgcccacacggcagatgggactcctgttcacctggtatgactctctcaccggggttccggtcagccagcagaacctgctgctggagaaggccagtgtcctgttcaacactggggccctctacacccagattgggacccggtgtgatcggcagacgcaggctgggctggagagtgccatagatgcctttcagagagccgcaggggttttaaattacctgaaagacacatttacccatactccaagttacgacatgagccctgccatgctcagcgtgctcgtcaaaatgatgcttgcacaagcccaagaaagcgtgtttgagaaaatcagccttcctgggatccggaatgaattcttcatgctggtgaaggtggctcaggaggctgctaaggtgggagaggtctaccaacagctacacgcagccatgagccaggcgccggtgaaagagaacatcccctactcctgggccagcttagcctgcgtgaaggcccaccactacgcggccctggcccactacttcactgccatcctcctcatcgaccaccaggtgaagccaggcacggatctggaccaccaggagaagtgcctgtcccagctctacgaccacatgccagaggggctgacacccttggccacactgaagaatgatcagcagcgccgacagctggggaagtcccacttgcgcagagccatggctcatcacgaggagtcggtgcgggaggccagcctctgcaagaagctgcggagcattgaggtgctacagaaggtgctgtgtgccgcacaggaacgctcccggctcacgtacgcccagcaccaggaggaggatgacctgctgaacctgatcgacgcccccagtgttgttgctaaaactgagcaagaggttgacattatattgccccagttctccaagctgacagtcacggacttcttccagaagctgggccccttatctgtgttttcggctaacaagcggtggacgcctcctcgaagcatccgcttcactgcagaagaaggggacttggggttcaccttgagagggaacgcccccgttcaggttcacttcctggatccttactgctctgcctcggtggcaggagcccgggaaggagattatattgtctccattcagcttgtggattgtaagtggctgacgctgagtgaggttatgaagctgctgaagagctttggcgaggacgagatcgagatgaaagtcgtgagcctcctggactccacatcatccatgcataataagagtgccacatactccgtgggaatgcagaaaacgtactccatgatctgcttagccattgatgatgacgacaaaactgataaaaccaagaaaatctccaagaagctttccttcctgagttggggcaccaacaagaacagacagaagtcagccagcaccttgtgcctcccatcggtcggggctgcacggcctcaggtcaagaagaagctgccctcccctttcagccttctcaactcagacagttcttggtactaatgtgaggaaacaaacatgttcaggccctgaacatttccggtgctgactcggccttaaacgtttgtgccataatggaaaatatctatctatctgttctcaaatcctgtttttctcatagtgtaaactcacatttgatgtgtttttatgaaggaaagtaaccaagaaacctctaggaattagtgaaaaaagaacttttttgaggtgtgttactatactgctgtaagttatttattatataaagtattgtaaatagaatagtgttgaagatatgaaatatggctatttttaatggtgacaattatgacttttagtcactattaaattggggttacctatatcagtacaatttgtagttgtttccaggtttggctaataatcattccttaacctagaattcagatgatcctggaattaaggcaggtcagaggactgtaatgatagaattaaattagtgtcactaaaaactgtcccaaagtgctgcttcctaataggaattcattaacctaaaacaagatgttactattatatcgatagactatgaatgctatttctagaaaaagtctagtgccaaatttgtcttattaaataaaaacaatgtaggagcagcttttcttctagtttgatgtcatttaagaattactaacacagtggcagtgttagatgaagatgctgtctacaaggtagataatatactgtttgatactcaaaacatttttcattttgtttaaagtagaagttacataattctatattttaagtcttgggtaaaaaagtagttttacattttataaagtaaagatgtaaatgattcaggtttaaagctctatttgacttcctttttttgtttgagatagcgtcttgctgtgttgcccaggctggagtgcagtggtgtgatctcagctcagtgcaacctccgccccctgggatcaagcgattctcctacctcagcctcccaaatagctgggactacaaggtgccctccagcatgcctggctgatttttgtatttttagttgaggtgaggtttcaccatgttggccaggcgggtttcgaaatcctgacctcaaatgatccacccacctcagcctcccaaagtgctgggattacaggcatgagccaccacaaccgtcccactattttactttttaaaatgacattcctactgattgatttttatcttgctataagttcgatgacaccgtgaatctaataaggttcactgttgacacagtacaagttacatagctaaaatacatagcattgaagactaattttaaggattgacaagagtttattttctattgtgcaatatcttaaaggaagcaaccacctttgggaaagtgtatctgctgctcctagggccatgcttgtatacatatttaaataaacatattcatttacccgaaaaaaaaaaaaaaaa

SEQ ID NO: 1138 - DNA, 8083 bp, human
ctcgggcagcccagtctttgccatccttgcccagccggtgtggtgcttgtgtgtcacagccttgtagccgggagtcgctgccgagtgggcgctcagttttcgggtcgtcatggctggctacgaatacgtgagcccggagcagctggctggctttgataagtacaagtacagtgctgtggataccaatccactttctctgtatgtcatgcatccattctggaacactatagtaaaggtatttcctacttggctggcgcccaatctgataactttttctggctttctgctggtcgtattcaattttctgctaatggcatactttgatcctgacttttatgcctcagcaccaggtcacaagcacgtgcctgactgggtttggattgtagtgggcatcctcaacttcgtagcctacactctagatggtgtggacggaaagcaagctcgcagaaccaattctagcactcccttaggggagctttttgatcatggcctggatagttggtcatgtgtttactttgttgtgactgtttattccatctttggaagaggatcaactggtgtcagtgtttttgttctttatctcctgctatgggtagttttgttttctttcatcctgtcccactgggaaaagtataacacagggattcttttcctgccatggggatatgacattagccaggtgactatttcttttgtctacatagtgactgcagttgtgggagttgaggcctggtatgaacctttcctgtttaatttcttatatagagacctattcactgcaatgattattggttgtgcattatgtgtgactcttccaatgagtttattaaactttttcagaagctataaaaataacaccttgaaactcaattcagtctatgaagctatggttcccttattttctccatgcttgctgttcattttgtctacagcgtggatcctttggtcaccttcagatattttagagctacatcctagagtattctactttatggttggaacagcttttgccaacagtacatgtcagctgattgtttgccaaatgagtagtacccggtgtccaactttgaattggttgctggttcctctcttcttggttgtcttagtggtaaacctaggagtagcctcttacgttgagagcattctcctgtatacattaacaactgcttttactctggcccacatccattatggagtacgagtggtaaagcagctgagcagccattttcagatttaccccttctcattgaggaaaccaaactcagattgactaggaatggaagaaaagaatattggcctgtaataatctttctttgggcacaaagaagtactgtaaataaatgcttgtaaatatttcctccatcaccattgaactagactgatctgcttgacagacgtgggatctcagtatggtacttggacagcaggaatgatacatataatctgaacttgggaaattttggacctactaactctaagcctattttattttttataaaactatgtgacattttggttgagcagaatgtacgttagaccagcaaaatgttcctaatggttctaacttcgtgagtttacaatgttgtgattcatgcagggttaaagatgctttgtttttattttttaagtaccaaaattggtttcagaacactgataacactcagaaaaccacagtgtgttttcatatttggaactttgtaatagcgggagtagcagtagtccaaacctagtatagggaaaggataaaaataagtcaccttcaccaagagatgccaatgattaccaaacaacagacagttgccaaatactggtttctctttcccctgaaaatggcttttgttctcaaatgataagagagctaatacatttagctaatattctagctctctttattatggaacagatcttgatagatggtttaattttctcctaaagagaaataatcagttgagaatttgagaatgggttgtaattatcgctcacccattgggatggttcattgtttaaatatggcattttccccccttcagctgcaggttcctgagatttggtgcctgtgagctctgattgtaggaatgcatgtgacagtcccagtcctatggtaatgacttaggaggaatgcagataaaagtaccttgtaagataaatataaattggagttaggaatttcatgaacctcactatgaccaaaattaattttttgattcagtttgtctgtctgtctgtccttcccctctcttcttttttcagggtgaggtgctgtgtttcttatttcatacgagataaaacagagagaagttctctcttctccagcttgtccatttccccacttgaagaaaacttttgatatatatgccttactgagtacatgccccctttaatgttaacatgacttggagtaatttctgaggtttactgacaaacataaaaatccctttaattgtagtgtagttgttctataaaccatattttttcatgatgtggatattttcttctatttctttgtcttcatttaatttggtggtggtgaactttacttgctgattttcttttatttttcactgaatgaagtttgtgcttgaatgaagagtgtatcttaaaccccctttttttggacaggctgcacttggataaaataggcaccactgtgttgatatgtaattaaattcataactatttatgaatgtgaccattgttaaatttaattatagtgtatttctttcttgaatttcagtctgctgctttgtaaaaaataactgtaattgatatttcatttttaaaatttataaattccaatcattgtcattcaagttattagaaatgagtcacggcactaactcatggttctatactcattttaagaaattgtaaaggttgaggtgtatttggtgactttctctgagacacagatgaacgttggaaatagatgagaaatggatgcagaataatgcagatagtgatcccatgtttgttaattgccatcatggaagtcagagaattaaccaattaagtgacggtaactattttttgtataccttgttctttgtgatctataaaattaaactggataaaatgttaattgggggtagggaaaaagctttgttttaagatttctaagctaattattttaccgttttgttgaccttgtacacaagaatgagattaatctgtattatataagaaaagaactgataaatatttataaaatgacaaacttggaccacaggctttcttgaccttgtacagtatagtaaaaataccctttacttctgacattttaaggtcacgtcctatagtttgggggcccttttacttcaaaggtgtgtttctgccctcttttggttgtatcaaatttatttgaaaattgttttgtgctgtactttatgacttgtttccctatggtggtaaagaatgatgccatagtcagttttattgacattgttagatgaaagaaaagtagctgtcaacaaggggaaagtgaaattgagcaattcactgtttcaggatacttgaggatctttagtgtactgctgactctttttcttgttttgtctgccattcttgaaagtgcatcttgagagcccccatttgttgtgtagagatatagcagctgaagcaggacttcattccagatagctgtgtgcatttatgtcatgccaattactataacatttccaaagtatgaaaggtctttcaggcttatgcatgatattgtgggtgacttcatgccccagcctttctccccagcatacagtgagctgccttttggggagcaatgccatgataaggagcatacgtgcatgttttccgtactttcagaatagagtgccttagctaggccagaggctcgtattgtgtttctgctgaccaaagttgcatacacctgtaagaagtgtctttttaggttatggtattaaaaaagtcgtttcaggcttatcagataataattctcctatatttgaggggggcatgggataaaaagatttaataatacctggatagagaatgctaatgctgccttttgtgatcctttaatattatccatgcttttataaagtgcagtacacattttgacattgccacagtttacagtgtcattcttccacgaataggtaattgatagagtttatgggtcttagtcttaagggtaacagagtgaataccttccaaataaaaagctaaatattcctccttgtcattttaatgtcattattgaaatacttttaattctaattttcaaaagaaagctaaatgctgattgtggtttaggatgttacagtactaataccatcatgttatttattctaatatagaggcattgagaggaggggagtgtatgtctagagttaccccaattctaaataggtaccaaaagagtattgattatgacctggagcctgagctttgggagaatatacaaaggaaaaagcaggcatagtttccactttaaagggaagaagggactttaacatcctatgaatttgaaacatcctatgaatttgaaagtttcctaagtgttgttttcaaagaactggtttattttatagtcagtcaaaatgcatttggaatgtaccttgcttccataacagactttgactctatgacctatgaagaataaaaagataatctgaaggtgtttgagtcagaggctacttttcccctttatattttatatagaagcctatttgtaattcttcctcttcgttcttcacctgggtttcctcttatctacccaccacctaggacagaggctgcccactcaggtcttgccttgttgcccctagatgttgccacattcacatctccttgatggccttagatctcttgactagtcaaggactgggaacgtgccagggggaacaaagtaagcttgatgggctggaacttttgactttgggtccccaaacagccaaaaacagatacagaaatctttggttgtgtggatgcctgtgttcagagtggccttatcttgacctcagttctggatttaagtactctatagaaaatttgtgaagtcagaccagaattttctttgtcccatgaggtgtctttgtaagtcagcatgctcttgcttgaacaccctgtgggtgaataactttagtaagttagctgccagcattagaaccttccaggaagaattttaactagtatgctacatttgaagcactctgacatgtacatttaaagtgacagttttaaaagtaaaatggtgttaaatctctgaaacttgaacgtatgatgctctggacattttaggaagcttaagtaaatttctgattttcctttattgattatgtaacccacgtgatttgcatattttagtttttatgtttgacagtggtacaaatgactgacattggcaggcagttattgtagggtatatggttaatcacgattgtctaacttttccagagaaagtggtgatatgcttcttccttgcatggagctgtgggaattggatttgttggctcttcatttccagtgtttctacagtgcagaataaatgtaactttttaagcctgcatgctagtaatatgctttgctctttagtaaacaaatatgcaatagatagtaatctatctactttttttaaagcagggatctgctccctatctagacagatcttttaatgcattaatatttagagtagcaaaagaagttttgccatttgtagctctctcacaggtagcttaagcgagggggttgtgttgcatgtgcttagaaaggccaggatcccagaattggaaggtgccacatatacttttagaatattttaacaaaggcttgtctctaggaaaatccacttggactgcagcaggattgttctggtcttccacagaccattcacatggtctttctctccagagaatcattcttagaaagccaggctaaatcagagtagtgctgtttttaaagcaagtatattggatgatggctatagggtaccttaatgctgtgttgaaattggaagcagactgctcttcagcagcacatatactgcaactgaagttagagacagtactgaagacgagggagtagctaaatgctgtggatatttcatgtctgtttggctaatgtcttctcttgaggagtttctatgggtagcaattaaaattagaatttattttaaggtttttattaaaatatatacaatttgccataaattctagattctgatattcttgacaagcactttttgaatatctcaagagtaagttcttgacctggaacatatatagttagtacttgatgtcactaaccaagttgtagaaggagcctgttataattctgcaagatctgtgaatagcattataaatctggggcaggtgcctgtaatcccagcactttgggaagccaaggcaggtggattgcttgagcccaggagttcgacaccaacctgagcaacatggcgaaaccccgtctgtaataaaaatacaaaaaaattagctgggcatggtggcatgtgcctgtaatcccagttactggggaggctgaggcaggagaatcacttgaacctgggagatggagattgcagtgagcagagattgtgccactgcactccagccagagtgacagagcaagactccatctcaaaaaataataataaaaataaacaaatctgtttaaattactgttgcctttcagcattagactttgagtttaataactacaaattgagactgctcacaatattaactttttttgtaggttattttgttgtttagataacttgcctccctagaggagcattcaggagataaagacctagctacatgtaatgatatgatcatttcaaaaatgtgccaagaaagcaaaattcattattgaactctaaatttctgggtgtttttttttttaaagtagcattttctctgggtaaagggaaaggcaatgaatgattgccaacatgtaaactccctgctgcccgccttcccccagtcccctccatctaacataatacagtaaatttgtagccagttgtagaaaaagaaattgatatctttctgagtaaggtttcatgccctgtgactaagaataggtggaggaatcatggccaaatcaaatatgaattgtttagcttggtcctgttgcagttggctttctgtagtgttctgaaacaagaggacgattccattccttctcaggaacctagaaacaacaccgcttgagcaactggaatatgtttgctgcaagcagaatattttggggagaggaagagtagtttaattcaagtagtttaattgaacatattagtcattggtctgtctgggacgtgcagtgttcatagtagcaatgtatgtaccatttattttatctggttgtgtgtgatgtgtgtgtatgcctatttaatatgtacacatatattcactacatatgtatgtatgatatattcatatatacatgcagtctgcttgattatcagcaaaatggtcagcctttatcagatagtttcttcatgtggagttcatctgcatgtggcccttactctgaagcctcttcctgatctggagccacagtctgtctgtcttccagttcatctcagtcctcgagaaaggccctttaaatatgtcactttcccattttcctttaaccatgggttgtgtgagccagaaagagctttgagaaagatggctgcttccaccagggtggaggcttctaggtctgcatgatgatggggcccgtttctggccagagggtggctctgggagcagttgtgctgcgggcttgctgggggagaactctaactgttgcagaaacagagcttcatggcttgcttaaattacttagctggaatattttaaagtgtcagataatgtgatgtacaaagagagtatgccgatgcatttcattgtttttgcattatctgtatcagtgtttcccattgctagcccgaataatcaagaccagactgtttcttgtcactggattctggaagccttgccctttcaactggatttatgtttgtttctgctgctgtgaaaccccaaagtaatgcagtaggttttaattgaaaattgtttaattctattattgataattatttattgtaataaaagtaaaagagtaatttttaaatcctttt

SEQ ID NO: 1139 - DNA, 2020 bp, human
gcgcagaggcgtcacgcactccatggtaacgacgctcggcccgaagatggcggccgaatggggcggaggagtgggttactcgggctcaggcccgggccggagccggtggcgctggagcgggtctgtgtgggtccgaagcgttttactcctgttgggcgggctccgggccagcgccacatctactcccgtctccttgggcagttcccctccctgccggcaccacgtcccctctgacactgaggtcataaataaagttcatcttaaggcaaatcatgtggtcaagagagatgttgatgagcatttaagaatcaagactgtctatgataaaagtgttgaagagttgctccctgagaaaaagaatcttgtaaagaacaagcttttcccacaagcgatttcttatttagagaagacttttcaggtccgtcgacctgcgggcactatcttacttagcagacaatgtgcaacaaaccaatacctccggaaggaaaacgatcctcacaggtactgcaccggggagtgtgccgcacacacaaagtgcggccccgttattgttcctgaggaacatctccagcaatgccgggtctaccgtgggggtaagtggcctcatggagcagtgggtgtgccagaccaagaaggcatctcagatgcagactttgttctttacgttggtgctctggccaccgagagatgcagccatgaaaacatcatctcttatgcagcctattgtcagcaggaagcaaacatggacaggccaatagcaggatatgctaacctgtgtccaaatatgatctctacccagcctcaggagtttgttgggatgctgtccacagtgaaacatgaggttattcatgccctgggtttctctgctgggctgtttgcattctaccatgataaagatggaaatcctctcacttcaagatttgcagatggcctcccaccttttaattatagtctgggattatatcaatggagtgataaagtagttcgaaaagtggagagattatgggatgttcgagataataagatagttcgtcacactgtgtatctcctggtaacgcctcgtgttgttgaggaagcacgaaaacattttgattgtccagttctagagggaatggaacttgaaaatcaaggtggtgtgggcactgagctcaaccattgggaaaaaaggttattagagaatgaagcgatgactggttctcacactcagaatcgagtactctctcgaatcactctggcattaatggaggacactgggagacagatgctgagcccttactgtgacacgctcagaagtaacccactgcagctaacttgcagacaggaccagagagcagttgccgtgtgtaatttgcagaagttccctaagcctttaccacaggaatatcagtactttgatgaactcagtggaatacctgcagaagatttgccttattatggtggctccgtggaaattgctgactactgccctttcagtcaggaattcagttggcatttaagtggtgaatatcagcgcagctcagattgtagaatattggaaaatcaaccagaaatttttaagaactatggcgctgaaaagtatggacctcattccgtttgtctaattcagaaatcagcattcgttatggagaagtgtgagaagaagctgagttacccagactggggaagcggatgctatcaggtttcttgttctcctcaaggtctgaaagtttgggtccaagatacttcatatttgtgtagtcgggctgggcaggtcctccctgtcagtatccagatgaatggctggattcacgatggaaacctgctctgcccatcatgttgggacttctgtgagctctgtcctccagaaacagatcctccagccactaacctgacccgagctctgccacttgatctttgttcctgttcctcgagcctggtggtcaccctctggcttctgctaggcaatctgtttcctctgctggctggatttcttctgtgtatatggcactaggaatggaaaagtggatcttcaagatattct

SEQ ID NO: 1140 - DNA, 5118 bp, human
ttctaatgatcccatcaccaaagtagcaaacgtagtacccaggattttttttttcctagttagtcttcatgttaagtacaatcttacctcaaaattgttaatgtctgtggtttaaaaaaaaacatgaatcagaaatggtgtgggtagtttagaaaatgagttaggttcaggtggccggttagctcagttggtcagaaaatgagttaggttcatctgggaagacttcctgggagaaaagaccctgggttctgaggtaaagtggagtagggataagatgtgcaaggcaggaagggagttgattccttaggtaagtgaattattggaggtgaggggtatgtctggctcctgagtcagccacgatgtgcctccttgtcttcccccttgtccccaggagtccagattacatcctaccctgcagtcctggatggcgcctccgacttgcagcttccttcctgctttccgtcttcccgctgctagaccttcttccagttgctttgccaccaggggcaggcccaggacccatagggctagaggtgttggcagggtgcgtggcagctgtggcctggatcagccacagcctggccctgtgggtgttggcacattcccctcatggccactcccggggtcccttggccttggccctggtagccttgctgccagctccagccctagtgctgaccgtgttgtggcattgccagcgaggcacacttctgcccccacttctcccagggcccatggcccgcctatgcttgctcatcctgcagctggctgcactcttggcctatgcactgggatgggcagctcctgggggaccacgagaaccctgggctcaggagcccctcctgcccgaggatcaagaacctgaggtggctgaagatggggagagttggctgtcacgcttttcctatgcctggctggcacccttgctggcccgtggggcctgtggagagctccggcagcctcaggacatttgccgcctcccccacagactgcagccaacctacctggctcgtgtcttccaggcacactggcaggagggggcacggctgtggagggccttgtatggggcctttggacggtgctatctggcacttggactgctgaagctggtggggaccatgttgggattctcagggcccctgttgctctccctactggtgggcttcctggaagaggggcaggagccactaagccacggcctgctctatgctctggggctagccggtggggctgtgctgggtgctgtgctgcagaatcagtatgggtatgaggtatataaggtaacacttcaggcacggggggctgtgctgaacatcctgtactgcaaggctttacagctggggcccagccgccctcctactggggaggccctgaacctactaggcactgactctgaacggctgcttaactttgctgggagcttccatgaagcctggggcctgcccctgcaactggccatcaccctctacctgctgtaccagcaggtaggcgtggccttcgtgggtggtctcatcttggcactgctgctggtacccgtcaacaaagtgattgccacccgcatcatggccagcaaccaggaaatgctacagcacaaggatgcgcgggttaagcttgtgacagagctgctgagtggcattcgggtcatcaagttctgcgggtgggagcaggcactgggagcccgagtagaggcctgccgggctcgagagctggggcgactccgggtcatcaaatacctggatgcggcctgtgtatacctgtgggctgccctaccggttgtcatctccatcgttatcttcatcacctatgtcctcatggggcaccagctcactgccaccaaggtgttcacggccctggcactggtgcgaatgctcattcttcctctcaacaacttcccttgggtgatcaatggtctcctggaggccaaagtgtccttggaccggatccagcttttcctcgaccttccaaaccacaacccccaggcctactacagcccagattgtggtagattaggagcccaaatcaagtggcttctctgttcagatccccctgcagagccatctacagtattggagctgcatggagccttgttctcctgggacccagttggaaccagcctggagaccttcatcagtcatctcgaagtgaaaaagggtatgctggtgggcatcgtggggaaggtcggctgtgggaagagctccctgctggctgccatcgctggagagctccacaggctgcgtgggcatgtggcagtgcgggggctgtccaagggctttggcctggccacccaggaaccctggatccagtttgccaccatccgagacaacatcctctttgggaagacatttgatgcacagctgtacaaggaggtgctagaagcctgcgccctcaatgatgacctcagtatcctgcctgctggagaccagacagaggtgggggagaagggtgtcacccttagcggaggacagcgtgcccggattgcccttgctcgtgctgtctaccaggaaaaggagctctatctcctcgatgaccctctggccgctgtggatgcagatgtggccaaccacctgctgcacaggtgcatcctgggcatgctgagctacaccacacggctgctctgcacccaccgcactgagtacctggagagggctgacgcggtgctgctgatggaggccgggcgcctcatccgggctggacctccctctgagattctgccactggtacaagctgtccccaaagcctgggctgagaatggacaagagtctgactcagccacagcccagtcagtacagaacccagagaaaacaaaggaggggctggaggaggagcagagcacatctggtcgcctgctgcaggaagaaagcaagaaggagggcgccgtggccttgcacgtgtaccaagcttactggaaggccgtgggccagggcttggccttagccatcctcttctctctgcttctcatgcaagccacgcggaacgctgctgactggtggctctcccactggatctctcagctgaaggctgagaatagctcccaggaggcgcaaccctccaccagcccagcttctatggggctcttctctccgcagctgctcctcttttcccctggaaacctctacatcccagtgttcccactgcccaaagctgcccccaatggctcctcagacatccgtttctacctcaccgtgtatgcgaccattgctggtgtaaattccctctgcacccttctccgggcagtgctctttgcagcaggcacccttcaagcagctgccactctgcatcgccgcctgctgcatcgagtccttatggcaccagtgactttcttcaatgccacacccacgggccggatcctaaaccgcttctcctctgatgtggcctgtgcggatgacagcctgcccttcatcctcaacatcctcctggccaacgcggcaggcctgctggggctcctggccgtgctgggctctggcctgccctggctgctgctcctgctgccgcctttgagcatcatgtactatcacgtgcagcgccactacagggcctcctcacgggagctgcggcgcctgggcagcctcaccctgtctccactgtatagccatctggccgataccttggctggcctctctgtgctccgggccacaggggccacctacaggtttgaggaggagaacctgcgactccttgagctaaaccagaggtgccagtttgccaccagtgccacaatgcagtggctggacattcggctacagctcatgggggcggcagtggtcagcgctatcgcaggcatcgctctggtgcagcaccagcagggcctcgctaacccagggctggtgggcttgtcgctgtcttatgccctgtccctgacgggcctgctctcgggcctggtgagcagcttcacacagacagaggccatgctggtgagcgtcgagcggctggaagagtacacctgtgacctgccccaggaaccccagggccagccactgcagctgggcaccggctggctgacccaggggggcgtggagttccaggacgtggtgttggcgtaccggccagggctgccgaatgccctggatggagtgaccttctgcgtgcagcctggagagaagttgggcatcgtgggccgcacaggctccggcaagtcttccctgttgttggtgctcttccggctgctagagcccagttcagggcgagtgctgctggacggcgtggacaccagccagctggagctggcccagctcagatcccagttggctatcatcccccaggagccctttttgttcagtgggactgttcgggaaaacctggacccccagggcctacataaggacagggccttgtggcaggccctgaagcagtgccacctgagtgaggtgattacatccatgggtggtctggatggtgagctgggtgaggggggccggagcttatctcttgggcagaggcagctgttgtgtttggccagggctctcctcacagatgccaagatcctgtgtatcgatgaggccacagcaagtgtggaccagaagacagaccagctgctccagcagaccatctgcaaacgctttgccaacaagacagtgctgaccattgcccataggctcaacacgatcctgaactcagaccgggtgctggtgctacaagcggggagagtggtagagctggactccccggccaccctgcgcaaccagccccactccctgttccagcagctgctgcagagcagccagcagggagtccctgcctcactcggaggtccctgagcccaatcccacaccctgcagagttctcccctctctctgatccaggccgggcctatacagaggtgctggctgcttgtttacattctcctctggggctctacctctccacacttccccagaagggaaaagggcaccctggattactctttggaaatcactccttggtgggcagcatcctgaggcttccccagaaccaggcctctgctctggccctcttgcatctggaacgccaggtgggtttttctggcataggagcccacttgcattttcatagttttatttgataaaattccatcttacattctgtgtattaaaaaaataatatttctggtgtaaaaaaaaaaaaaaaaaaaaaaaaaaaaaa

SEQ ID NO: 1141 - DNA, 2093 bp, human
acgcacgcgcactgcgcccagcatgagggtcgcggctctgatcagtggtgggaaggacagctgctataatatgatgcagtgcattgctgctgggcatcagatcgttgctttagcaaatctaagaccagctgaaaaccaagtggggtctgatgaactggatagctacatgtatcagacagtggggcaccatgccattgacttgtatgcagaagcaatggctcttcccctctatcgccgaaccataagaggaaggagcttggatacaagacaagtgtacaccaaatgtgaaggtgatgaggttgaagatctctatgagcttttgaaacttgttaaggaaaaagaagaagtagaggggatatcagtaggtgctatactttctgactatcagcgtattcgagtggaaaatgtgtgtaaaaggcttaatctccagcctttagcttatctttggcagagaaaccaggaagatttgctcagagagatgatatcatctaacattcaagcaatgatcatcaaagtagcagctttgggtttagatcctgataagcatcttgggaaaaccctggatcaaatggagccttatctcatagagctttctaagaagtatggagtacatgtttgtggagaaggtggagagtatgaaactttcactttggattgccctctatttaagaagaaaataattgtggattcatcagaagtagtcatacattcagctgatgcatttgcacctgtggcttatctacgctttttagaattgcacttggaggacaaggtgtcctcagtgcctgacaactacagaacatctaattatatatataatttttgaaaagtgttttggaacattgttcattaaaccaccatttctatacaaaaaaattgcatagtattttctcagttactatgactagtttatttttttctcatgactcttatttttttagagaaacatactttcactagaagaggttagtggaaccatttattaattgggaaaatgtcgacggcatgttcattaatagtgccaactttcttggaattcactctttctctttcgataacacatcttccctatgacctttttttcttttatttcatctataaaccccatttctgtagcatttctttttttatcacactagtttcttttcctccttctctctttcttgctccaatccctaccaataatgtcatgatgcagaggcatttgaaaatgaagatgaaaagatggtcactttatttagccagtcaagcttattctactgggtgtcgccaaagcgatttatcatttttattttaaatatattcatggttgaagtgtttcaacgttattggacaattaggaagaatgtccttaactcttacaagttattttataactgatttttaaaatgctgtttttcagtattaactatgttgaccttagaaaacttttacaaaaaatagactttatgttttagaacagttttaggttcacagcaaaaatggagcagaaaatgcagagatttcccatataccctctacctccacacattcacagcctcccctaccgtcaatgtcttataatagagtggtacatttgttacaactgatgaacctacattgacacattattatcacccaaagtccatagtttacgtgagggttcactcttggtgttgtacataatatgggttttgacaaatgtgtaatgacatttgtcaaccgttatagtattatacagaataatttcactgccttaaaaaatcctctgtgttttacttattcatccctccctctcctttaacccttagcaactgatcttttcactgtgtacatagttttgcttttaccagaatgtaatgtagttgaaatcatacagtatatagcttttcatgcagtatatagcttttcagattggcttctttcatgtattaatatgcatttaggtttctctgtatcttgtcatgtatatgtagctcattttttttttagtgtagaataaaattttattgtctggttctaccacatttcatttgtccatgcacctattgaagaacatctcagttgcttccatgttttggcgattatgaataaagcgactataaacatccatg

SEQ ID NO: 1142 - DNA, 1353 bp, human
gtgccagtccatctgacatcaaagccagtgtctctaatggtgacaccaccctcctctgcagcaggaggcagagctgtgggatgaatgaggttcgccaggtctcccttacctatcctgggtccccagctccttctcactctcttcccttgcagcctcgaagcggaggatccctgtgtcccagccgggcatggccgacccccaccagcttttcgatgacacaagttcagcccagagccggggctatggggcccagcgggcacctggtggcctgagttatcctgcagcctctcccacgccccatgcagccttcctggctgacccggtgtccaacatggccatggcctatgggagcagcctggccgcgcagggcaaggagctggtggataagaacatcgaccgcttcatccccatcaccaagctcaagtattactttgctgtggacaccatgtatgtgggcagaaagctgggcctgctgttcttcccctacctacaccaggactgggaagtgcagtaccaacaggacaccccggtggccccccgctttgacgtcaatgccccggacctctacattccagcaatggctttcatcacctacgttttggtggctggtcttgcgctggggacccaggataggttctccccagacctcctggggctgcaagcgagctcagccctggcctggctgaccctggaggtgctggccatcctgctcagcctctatctggtcactgtcaacaccgacctcaccaccatcgacctggtggccttcttgggctacaaatatgtcgggatgattggcggggtcctcatgggcctgctcttcgggaagattggctactacctggtgctgggctggtgctgcgtagccatctttgtgttcatgatccggacgctgcggctgaagatcttggcagacgcagcagctgagggggtcccggtgcgtggggcccggaaccagctgcgcatgtacctgaccatggcggtggcggcggcgcagcctatgctcatgtactggctcaccttccacctggtgcggtgagcgcgcccgctgaacctcccgctgctgctgctgctgctgggggccactgtggccgccgaactcatctcctgcctgcaggccccaaggtccaccctgtctggccacaggcaccgcctccatcccatgtcccgcccagccccgcccccaacccaaggtgctgagagatctccagctgcacaggccaccgccccagggcgtggccgctgttacagaaacaataaaccctgatgggcatggaaaaaaaaaaaaaaaaaaaaaaaaaaaaaaaaaaaaaaaaaaaaaaaaaaaaaaaaaaaaaaaaaaaaaaaaaaaaa

SEQ ID NO: 1143 - DNA, 3210 bp, human
gccggatcccggaccatggcggcggcggggggcgccgaggggcggcgcgcggccctggaggcggcggcggcggcagctcctgagcggggaggcgggagctgcgtgctgtgctgcggagacctggaggccacggcgctgggccgctgcgaccacccggtgtgctaccgctgctctaccaagatgcgggtgctctgcgagcagcgctactgcgccgtgtgccgcgaggagctgcgccaggtggtctttgggaagaagcttcctgcctttgccaccatccccatccaccagctgcagcatgagaagaaatatgatatctactttgcagatggaaaggtgtacgcattgtacaggcagctgctgcagcacgagtgcccgcggtgccccgagctgccacctttcagcctcttcggggacctggagcagcacatgcggaggcagcatgagctcttctgctgccgtctgtgcctccagcacctccagatcttcacatatgagcgcaagtggtactcgcgcaaggacctggcccggcatcgcatgcagggtgaccccgatgacacgtcgcaccgtgggcacccgctctgcaagttctgtgacgagcgctacctggacaatgatgagctgcttaagcacctgcgccgcgaccactacttctgccacttctgcgactcggacggggcccaggactactacagcgactatgcctacctgcgtgagcacttccgggagaagcactttctgtgtgaggaaggccgctgcagcacggagcagttcacccacgccttccgcaccgagatcgacctcaaggcccacaggacggcctgccacagtcgcagccgcgccgaggcacgccagaaccgccacatcgacctgcagttcagctacgcgccacggcactcgcgccggaacgagggggtcgttggtggcgaagactacgaggaggtggacaggtacagccgccagggccgagtggcccgggctggcactcgcggagcccagcagagccgccgaggaagctggaggtacaaaagggaagaagaggaccgagaagtagcagctgctgtccgggcctccgtggccgcacagcagcaggaggaggctcgcaggagtgaggatcaggaggaaggcggtaggcccaagaaggaggaggcagcggcgcggggacctgaggatccccgtggcccccggcgctcaccccggactcagggcgaaggcccaggccccaaggaaacctcgacaaatggtcctgtaagccaagaagccttctcggtgacaggcccagccgccccagggtgtgtgggggtgccaggcgccctcccaccacccagcccgaagctcaaggacgaagacttccccagcctctctgcctccacttcctcctcctgctccactgcagcaaccccgggccctgtggggttggcgctgccgtacgccatccctgccagaggcaggagtgccttccaggaggaggacttccccgccctggtgtcctcggtgcccaagcctggcaccgcccccaccagccttgtctctgcctggaacagcagcagtagcagcaagaaggtagcacagcccccactctcggcgcaggctaccggcagcggccagcccaccaggaaggctgggaaggggagcaggggcggcaggaagggcggcccgcccttcacacaggaggaggaggaggacggcggcccggccctgcaggagcttctgagcacacgccccacgggctccgtctcctccacactggggctggcctccatccaaccctctaaagttgggaagaagaagaaagtgggctcggagaagccaggcaccacattgccacagcccccgcccgctacctgtcccccaggggctttgcaggccccggaagctcctgccagcagagccgaggggccagttgccgtcgtcgttaatggacacacggagggcccggcccctgctcggagtgcccccaaggaaccccctgggctcccaaggcccctggggtccttcccctgccccacgccacaggaggacttcccagcgctcggcggcccctgcccaccccggatgccgccgcccccaggcttcagcgctgtggtgctcctgaagggcacgcctcccccacccccgccgggcctggtgcccccaatcagcaagccgccccctggcttctctggccttctgcctagcccccacccggcctgtgtccccagccccgccaccaccaccaccacaaaagcacccaggctgctgcctgccccacgggcgtacctagtccccgagaacttccgggagaggaaccttcagctcatccagtccatcagggacttcctgcagagcgacgaggcccgcttcagcgagttcaagagccactcaggggagttcagacagggcctgatctccgcagcccagtattacaagagttgccgggacctgctgggggagaatttccagaaggtctttaatgagctgctggtcctgctgcccgacacggccaagcagcaggagctcctgtctgcacacacggacttctgcaaccgcgagaagcctctgagcaccaagtccaagaagaacaagaagagcgcgtggcaggccaccacccagcaggcgggcctggactgccgtgtgtgccccacctgccagcaggtgctcgcgcatggcgatgccagcagccaccaggcgctgcatgctgcccgggacgacgacttcccctccctgcaagccatcgccaggatcatcacgtagctcccgccagcgtggccagagctgtcgcaccgtgagcgtccttcctccttcctctccgggctgccaggcagccaggtaaggcctggtgaggccacttggcctcttggttggccaggcccaccaggaagtcaccaggacagtccacccgccctgttggcacactcaagcgggagtccacccctgcctcagtggtgggccagtctcggtttgcattcttgtgcttttgggaggtgccaggggagggaagggctgggatgctgggacctgttgttgctggcaaagccagaggtcacagtggcctgatctgggccctcccaaagctgagggctgcagcccgtggggcctcagagctgaaagctgcggcgccactggtgccagagtcagatgtcacagatgtgttgtgtaaacagttggctgtttcgtgcttcaagaatgttcaggattaaaagcagacaagaaattgtgaaaaaaaaaaaaaaa

SEQ ID NO: 1144 - DNA, 1553 bp, human
gcggggattgtttacgtctcgctccggggcggaaagtgggtcagggccgggccggcggagcgcgcagcgggggctgcagattctttccaccatggccagacgcccccggaacagcagggcctggcacttcgtcctgagtgcagcccgccgagacgcagatgcccgggccgtggctctagcaggctccactaactggggctacgactctgatgggcagcacagcgactcggactccgaccccgagtactccacgctgccgccatccatccccagtgcggtgcccgtgaccggcgagtccttctgtgactgtgctgggcagagcgaggcctccttctgtagcagcctgcactcggcccaccggggcagggactgccgctgcggagaggaagacgagtatttcgactgggtctgggatgacttaaataagtcatcagccaccctgctgagctgtgacaaccgtaaggtcagcttccacatggagtacagctgcggcacagcggccatccggggcaccaaggagctgggggagggccagcacttctgggagatcaagatgacctctcccgtctacggcaccgacatgatggtgggcatcgggacgtcggatgtggacctggacaaataccgccacacgttctgcagcctgctgggcagggatgaggacagctggggcctctcctacacgggcctcctccaccacaagggcgacaagaccagcttctcatcgcggttcggccagggctccatcattggcgtgcacctggacacctggcacggcacactcacctttttcaagaacaggaagtgtataggtgtggcagccaccaagctgcagaacaagagattctacccgatggtgtgctccacggcggcccggagcagcatgaaggtcacccgctcctgtgccagcgccacttccctccagtacctgtgctgccaccgcctgcgccagctgcggccagactcgggagacacgctggagggtctgccgctgccgccgggcctcaagcaggtgctacacaacaagctgggctgggtcctgagcatgagttgcagccgccgcaaggctccagtgtccgatccccaggcagcgacctccgcccaccccagcagtcgcgagcctcggccctgccagaggaagcgctgccgccggacctgactgacttcccagtggaactgccttcttgggctgggacagcccctttcctctgtcccttctttctctgtcccttccttccagccacactccagggcggagttggatgaggcccgtccggagggagccatctcttgctcccgaggctgggacagtcctttctgtgggggctctagggcccctctgctgctgtgctgggtggggaagcggctgccctgagccccaggtcttgtgggaggctgcgaggacgagagcctggctggagcccgcgttgctgttcccacagggcctcggtttttcctaacttgctctgcatgctgtcagcggctgccccgccgtcatagacttaaaggactgcaataaatgtagagttgatgtctaacacccaaaaaaaaaa

SEQ ID NO: 1145 - DNA, 2370 bp, human
ccccgcccgtttgccagcgctcaggcaggagctctggactgggcgcgccgccgccctggagtgagggaagcccagtggaagggggtcccgggagccggctgcgatggacgccgtcttggaacccttcccggccgacaggctgttccccggatccagcttcctggacttgggggatctgaacgagtcggacttcctcaacaatgcgcactttcctgagcacctggaccactttacggagaacatggaggacttctccaatgacctgttcagcagcttctttgatgaccctgtgctggatgagaagagccctctattggacatggaactggactcccctacgccaggcatccaggcggagcacagctactccctgagcggcgactcagcgccccagagcccccttgtgcccatcaagatggaggacaccacccaagatgcagagcatggagcatgggcgctgggacacaaactgtgctccatcatggtgaagcaggagcagagcccggagctgcccgtggaccctctggctgccccctcggccatggctgccgcggccgccatggccaccaccccgctgctgggcctcagccccttgtccaggctgcccatcccccaccaggccccgggagagatgactcagctgccagtgatcaaagcagagcctctggaggtgaaccagttcctcaaagtgacaccggaggacctggtgcagatgcctccgacgccccccagcagccatggcagtgacagcgacggctcccagagtccccgctctctgcccccctccagccctgtcaggcccatggcgcgctcctccacggccatctccacctccccactcctcactgcccctcacaaattacaggggacatcagggccactgctcctgacagaggaggagaagcggaccctgattgctgagggctaccccatccccacaaaactccccctcaccaaagccgaggagaaggccttgaagagagtccggaggaaaatcaagaacaagatctcagcccaggagagccgtcgtaagaagaaggagtatgtggagtgtctagaaaagaaggtggagacatttacatctgagaacaatgaactgtggaagaaggtggagaccctggagaatgccaacaggaccctgctccagcagctgcagaaactccagactctggtcaccaacaagatctccagaccttacaagatggccgccacccagactgggacctgcctcatggtggcagccttgtgctttgttctggtgctgggctccctcgtgccctgccttcccgagttctcctccggctcccagactgtgaaggaagaccccctggccgcagacggcgtctacacggccagccagatgccctcccgaagcctcctattctacgatgacggggcaggcttatgggaagatggccgcagcaccctgctgcccatggagcccccagatggctgggaaatcaaccccggggggccggcagagcagcggccccgggaccacctgcagcatgatcacctggacagcacccacgagaccaccaagtacctgagtgaggcctggcctaaagacggtggaaacggcaccagccccgacttctcccactccaaggagtggttccacgacagggatctgggccccaacaccaccatcaaactctcctaggccatgccaagacccaggacataggacggacccctggtacccagaagaggagttcttgctcactaacccggatccgcctcgtgcccctgcctcctggagcttcccattccaggagaaaaggctccacttcccagcccttccttgcccctgacatttggactcttcccttgggccgaccactctgttctcattctccttcccaccaacatccatccgtccttctcagacaaaccactcactgggtaccccacctcctctctcatatgcccaacacgaccactgcctccctgcccccacacctgcacccaaacagacacatcaacgcaccccactcacagacaccccttaccccacccccactgtacagagaccaagaacagaaattgtttgtaaataatgaaccttattttttattattgccaatcccctaagatattgtattttacaaatctccctcttcccttcgcccctcccttgttttatattttatgaagttagtgcgggctttgctgctccctggcccaggaaagagggactacctgaccctcacctggcacccccctgctgctgcccaagccgctgggcctttttaattgccaaactgctctcttcatcagctcagcacatgctttaagaaagcaaacccaaaaaaaaaaaaaaaaagatgcagcatcaaaaaaaaaaaaaaaaaaaaaaaaaaaaaaaaa

SEQ ID NO: 1146 - DNA, 5606 bp, human
ctcaagctggtgaatccgcgattgcgtactagagaagggggccttagggaagtctcaaaatgctacgcttaaattttcctggagtccagatgtccttctgaatccactaaaccttgtgaagcgatgtgaacgtcagtacctggtgtgtaagaggaagctggagagtaagaaggaagccctgctgatcctctccaaggagctggacacctgtcaacaggaaagggaccagtacaaactcatggccaatcagctccgggagcgccaccagtcactgaagaagaagtaccgagagctgattgatggagatccatcacttcctcctgaaaaaaggaaacaggctaatcttgcacaactattgagagattctcaggaccgaaataaacatctgggagaagaaattaaagaacttcagcaaaggcttggagaagtccagggcgacaacaagctcttgaggatgacgattgccaaacaaaggctcggagacgaagcaatcggcgtgcgacactttgcagcccatgagcgtgaagacttggtgcagcagctagagcgagctaaggaacagattgagtctctggagcacgacctgcaggcttctgtggacgagcttcaggatgttaaagaagaacggtcttcctaccaggacaaagtggagaggctcaaccaggagctgaaccatatcctgagtgggcacgagaaccgcatcattgacgtggacgccctgtgtatggagaacaggtaccttcaagagagattaaagcaactccatgaagaggtcaacctcttgaaatcaaacattgccaaatacaagaatgctctggagagacggaaaaactcgaagggccagggtaaatccagcagcagtgctctgacaggagtcctgtctgcaaagcaagttcaggatctgctatctgaggatcatggatgcagcctcccagctactccgcagtccatttctgacctgaaatctctggcaacagccctgttggaaacaatccacgagaaaaacatggtcattcagcaccagaggcaaaccaacaagtaggtggccaaactcttgtgttggggggtgggcgcgaaggaagtgggacgaggctaccagaagtgaatgtcaaccagctggaacgacggacctgcagggaaggtgagacccctcaaatcaagaaggaaacttattaaactagaatggtgcttctgctttatatcagcatcttggctatcagctggagccaagcaaggaaagggtaccagccatactgaatgcttactctgagctacacactgagtagtatgtatttcatggatgagttccataaaataatcgcctgggtgacttgacccacctctcctccagctcttcttttaggggagaaactgcctcagtgccatttaaaactcccagcatgactttgagggtcttttaatggcagaaatcacccaagcatcaacttccacaggctgcggggcctagaaaagaatctcatgtcactcttccagatccacaaaaaagatggtgaaaaggaagggtaattaaaatggaatgtcttatctggtttttatagcatgttgactatgttgtgtaaaaccaagcaggttaacgtagccattagagatgacagaggtaatatcaagagtgttcagagaatggtgaataaacaataaattaaagtagcaaatactacacatggggttggctttgtgggcatgcaacctgtgctcagaaggaccccacattaggtctgatcttccactgtcaccatcttggaattcttagtcattgttttaacaagagggtcccacatttttattttgcactggaccctgcaatttatgtagctggtcctgcttgcaagacagacgtacacctggaaccaaaatgcaagtgtgagagaactgagcggggcctggaaagctaggcttcaagtgacaaagggagggaccagagaatccggggcctgacgaacgcaggggcatgggagagaggcaagtggaaaatgattgaaagtattataaaaacaaaatagaaaaagagaagctggagtgaagggaagattgcaccagagatgaagatgtatgtggaagaaagcggagagcagcaaagggaagcagggcaatctcgaagggatgacacgggtaatttattgacaggagaaggtttaaatgttcttgaaaagtgaaatcttaaccaaggaatgaaaagtcagatgctgaaatgcagttgcttctcaggggaggaagaaggaatgggcatcccctgcagcacgaaatgtcctccatgagctggcttcgtccttccctctctacagaacacctcatctttcaagccttctcacatcttctaaaccctggtccattctcagcaggtcaccacagttcctcattcactgagaaagtggggcttctcaccatgagcctctcaacttgcggctgccctgaaaccagtctccccatgttctgctcactcctgtctccaggaagtacaccagctgccatcttgttggtccatgggatctttcctcttctgggcctctgctcccctgggacctcctgtctcaccctcttcaacctcctcccttcttctggcttttgcctctttgccctgaactcccaaagcctttcctaaaccctgctgccttcccaaaaataccacccagcctggaatgtttttgaagaaggcctcctctccttcctcaacagccaccctgtctaaatgtattccgggaggtcacttatgttggaattgcttgggtgcagcggctggggggtggggacacttgtttataaatgcagaatcaaagatttgtgggagggaaggttaggattctggatttcagtaagtcccgggtgagtccatgcacaggaaagaaagataaccttggctttaatgcctcccaagacctcttcctacatttcccacggtattctttctttgcaggtcaccagtatccccaaactccacctttgagtctcttccttctttaatttcttcacattgagattttcatcttgaaatccaagtaagatggatttcaagggggaaactccagccttctccactgtctcatttccttttcccacctctcccctgacccccaccccagacccactccatcttttttctccatcttctgtgctttttcccctacctgggagacctcattccctgtctctgtctttgcttctcattctctgcagactcttctcagatctcttgtacccaccaccccatcaagagcaagaccaagaccccacatttccaacttctggttgatggtttctccagatatcctttcagctcctcaaattccatcagtcaacatccatcctagtatgtttcaaaaatggttatgccctttgaccatcacttcttccttggggagaccgtcccacagctccatcctcagaccccagtcctacctcccccgcctaacccacctgccagctacagttctgagcatgacactagccttctctgcaaagcagactgagtccccattgcctgccaaagacagcatccacaggctgtcggcctgacatgcctctgcagaggatcccagcctcctctgacagattgattcactaatgtgttcctaaccatacccactgcaaacacacccatgccccaggttcacagcactccctccctccattgtgaaagactgacattttcatttgaccatgtttatttttgtttctatgtactttttcatgtttattttttaataatttttgagccatcctctgggttttttgtttgtttgtttgttttgatggggtcttgctatgtctcccaggctggagtgcagtggcacagtcttggatcactacaacctccacctcccgggttcaagtgattcatgtgcctcagcctcccttgtagctgggaccacaggtgcatgccaccacgcctgactaattttttgtatttttttagtagagatagggttttaccatattgcccaggctggtctcaaactcttgacctgaagtcatccgcccacctcgacctcccaaagtgctgagattacaggcatgagccaccatgcctggcctctgtggttttaatttaatattaatttaaggttaaataacaatgtctttccaaactactcccagctaccttaatccccttcctggaagaaacgtccattcctcatttcttatatatccttccaaaggatgcatagacagtataagcaaatgcacaatatatttatgtatatacacatactcatatatttacatagatatactgtctttttttttttttttacaaacggtaactggtattcattttttaaaaaggtttcttttttcattattctgcatcttgatttttccccctgtaataatggatcttggagattgcttcgcatcagtacataagttgcctaatgtgccatctttaatacttagggggtcctctgtttcatacttttaataaatgttttatttgggggcatgtaaagaaactaattatactacaaatggaatgagggctgagaatagaatgtgactttggtctatgtgtgttctcccccttgatttagccttgtgtaactgaaataataaaatagcttttggaatgcactggaaactaccctggtctctgtgtgcatgacccaattgcaatcttagaaaaaaataataattaattaattttaaaaagaaaagaaatggctttattttgctggagcgttatacatagcagtaaaggtgttccttcctggcagcgtatgctcccatgctggttttccactgcctgacagttaccacccttgagaggctccaacggaagccatctcgaagaattgatgaagaaacctaggactttacatcttgagcaacattcaattaataggcaatttgcttgagctacttcttgccagcaagttggcagttgcctggtgatcgagaaagaacggatatgaggttcatttatctttcaaaccgggtggcaaagcattcgtggacgaggtggttgttcaagggccatttcactgtgcaccacatttcgttctccagaccttccccccaggcccatgccttaccatggcggggaggtggtggtgaatatatgaggacatattggccttttgctatccttcctgctatgcctgaaaccgtttcctcttctctttccctggccaatggtaaatgagcttggaaattcagcatcttggggagcagcagcaagagggtgtatggatcagagcagagacgtgaaaggaggccacctggggtagaagcaagcaggggcgtcttcaggcatgtagagacacagttacctgcttcccctttagagccaggctttccttaaagaccttcactctggtattcctgctgtctgtgttgtccagagagcgagcacagtagtgcagttcctgtgtgagttctgtcttcacagactcctcatcacagactcctttgatgatgtcattactatctaaaaccactgcagggaagccatctggagactgggcatcctgagagattttcctagactactaggtagatacatgctgaaatctcccccaaagcaacccataactaaataaaaactttaaaactttaaaatctccctcatcctaaaaaaaaaaaaaaaaaaa

SEQ ID NO: 1147 - DNA, 1581 bp, human
gctttcttcccgagggcggcacgagggctgggcggtggggtgcgggtgcccgggtgaggggcggagctgggggcatggcgtccggagcggctcgctggctagtattggcacccgtcaggtccggggctctccggagcgggcctagcttgaggaaagatggcgatgtctccgccgcatggagcggctcaggccggagcctggtaccgtcggggtcagtcatcgttacccgcagcggcgccattttgcccaaaccggtgaaaatgtccttcggccttctgcgtgtgttctccattgtgatcccctttctctatgtcgggacactcattagcaagaactttgctgctctacttgaggaacatgacatttttgttccagaggatgatgatgatgatgactaacaggaattacagaaaggagaaagcactaactgaagaaatggtgatgctctcagtttctctgccttccctatcagcagaaaggctcggggaaggccctcagcctcccagtctggtgaagcttcctgtatggtccatgaccgtattccaccccaggctctgggaggctccctgagatgtgctgtccactaagcactgcacaaacaagcaatcaaattatgaataaacataataaatatcagccgtgcgtgactgagtgatggctgcagtttctcagtatccctaggttctagttggtgcagttgtctctgctgtcctttatttatgggagaaacataggcccaggctatccaggctgcagtggagcctggtgaactattctgggggccctgggaactattttcattgtttacaaaagcccaacagaaactgtgcattttcccttaagaaagcttcatgggctaactaaagcctcatgccattctgtgttcagtgccagtcatgacagctctgcttgttagcatactacttaaatataactagaatgattcaaaactcgggttctgtgatatgaggatatagataggttttcatctatttcctggcttataactcccaaaacccttgttttaggcttttgttataatgttgggcacttcgggcctcagaaaacagcaggctgtttctcagatcttctcctgacctcctttcacctgctgctttttctccccaaggcaggccatagaaactaaaagtataatcttcctttgcccatcttccagttggccataaaaagaatcctctgacctaccttgtctgattttaggtcatgagacccccatttcagaagggattctgccccatacctgagaggaagaaatgtagacaggccttgttggacttccccactccatctgtattagattatgcctcttttgtccaatcccatttctccagtgttgtccatgcttcaatcatccctatccaatgaggtctccataaaaggcccaagaagacaggtttagagagctttcggagaacagaacacttggctttgcaaagtggcacgcctggagagaacttggaagctccacgccccttctatacctcaccctatgcatctcttcagctgtatcttttgtgatatcctttataataaaccagtaaacggaaaaaaaaaaaaaaa

SEQ ID NO: 1148 - DNA, 2523 bp, human
ggccatttttcttcctggtgtttgaatgactcataaaatgagtttggagtggtctgaagcctctgcctccttccttgaatgctttctaagaggggctgccatgcaagaatatatgctgattttcccatacggcgcctcatctcccagagatcttccttggagaccctggaagatattgaggagaacgcccctctccggagatgtcgaactctctcaggttcacccagaccaaagaattttaagaagattcattttatcaagaacatgcggcaacacgataccaggaatggcagaatagtccttatcagtggcagaagatccttctgtagtatattttcagtgctgccgtatcgcgacagtacccaagtcggggacttgaagttggacggaggaagacaatcaactggtgcagtgagtttgaaagagatcattggtctggaaggtgtggagctgggtgctgatgggaagactgtttcctatacccaatttctgttacccacaaatgcctttggagcccggagaaataccatagactccacctcctctttctcccagttccgtaacctgagccaccgcagcctctccataggccgggcaagcggcacccaggggagcctcgacacaggtagtgacctgggagactttatggactatgacccaaatctcttggatgacccccagtggccttgtggcaaacacaaacgcgttctgatcttcccttcctacatgacaacagtgattgactacgtgaagccctcggatctcaagaaggacatgaacgagaccttcaaggagaagtttcctcacattaagctgacactcagcaaaattaggagtctgaaacgagagatgcggaagcttgcgcaggaggactgtggccttgaggagcccacggtggccatggccttcgtctactttgaaaagctcgccctcaaggggaaactcaacaaacagaaccggaagctgtgtgctggggcatgtgtgctgttagcagccaaaattggaagtgacctcaaaaaacacgaagtcaagcatttaattgacaaactggaagagaagttccggctgaacaggcgagaactgattgcctttgaattcccggtgttagtggccttggaattcgccctccacttgcccgagcacgaagtcatgccccactacagacggctggtccagagttcctagcactggccccgaggacagccaagggccatttcttctcagcttggtggagcagcacttacttactactggaaatgaaaaaaagtagaactcagaataccagacttttcttcctctcgacatagtttggggagaagcagtactagaaactttccaaggagtcttgggtgtgtagccaagaggagccatgagctatggactcctcaagcacgggaagaggaggtgtgtgctgagaacagagaggccctgccctctgtccactagcgagaatccctagctgccccagcccagtctttctccccggcattcacaaactttgcaagcgtggtccagggccttctccagatctgttccaacttggagtgtgaagggcttgagcatacgggggaagagagtctgcagaagttgggggaaaacttttaaaagataccctcattgtgtcaaagagtgtgccaatctatttttgtatcagcattggaagtgcactttcccctggggcgtgtgggtgtgtgaatgtgcaagtgtctgagagatactgcatcagccctagacccccagagccagtcccgccctttacagagcagcccttagcctggggccatgggtcaggctgaccttcaacaattatttctagatgatttctggataagaattgctctctcggtaccagacagtttgacatcctccacccttagaaaatgactgacattgttttgttactgctcctacccaccaaggggataaagaaggcgagttctgagtgttggatgagtcagtcgcgtggaaggacgtggagcgtggcgctctgtaacttcctgccgtctgccaccccgccacgtgtatttaaccctcgcactttctccactgtggagatggctggggcggcgccccacagtgtgtattcctgtcctctatgttagagtgcatcagaagcacatttactgtgctatttatatcgctatataaaagtgttttataaaaacccagaataggagcccgacgcatgattggtgtttgaggcgtttgccagctgggacaaactgcgtttggagctgtggttaagctgactaaggaggcggtggctctttcttaacattcccacgtgcccagggctgttcatgcaagattttaatggtgacttgtcctggcttactgggacagtctgtatgaggcatgtcaccacactgtcgcctcatagctgcaagagagaggcaccagctgaagttcccctgactgaagagagcctgtggccatgtaaaaagagaattaaactcttgttgctttttgtaaaaaaaaaaaaaaaaaaaaaaaaaaaaaaaaaaaaaaaaaaaaaaaaaaaaa

SEQ ID NO: 1149 - DNA, 3914 bp, human
cacagcgctcggccgtcgagcggggtcgctaacccgcactctcttcggacctacgacatcgcggcttctctggcgttggccagtcagccacagggaactagtaaaaaaagaaaaagaaaaaataaagtgaaagaggcgtgttgtctagtttcaaaggagaggagagaagagactgagtcgccctgtgttgcccaggctggtcttgaactcctaggctcaagagatcctcctgcctcagcctcccaaagtgctgggattacaggcaactctggtagctctccttgtctggttgttttgaagaaagaagagtagaagaaaaagttgagtaaatcatgtcggagttactggacctttcttttctgtctgaggaggaaaaggatttgattctcagtgttctacagcgagatgaagaggtccggaaagcagatgagaaaaggattaggcgactaaagaatgagttactggagataaaaaggaaaggggccaagaggggcagccaacactacagtgatcggacctgtgcccggtgccaggagagcctgggccgtttgagtcccaaaaccaatacttgtcggggttgtaatcacctggtgtgtcgggactgccgcatacaggaaagcaatggtacctggaggtgcaaggtgtgcgccaaggaaatagagttgaagaaagcaactggggactggttttatgaccagaaagtgaatcgctttgcttaccgcacaggtagtgagataatcaggatgtccctgcgccacaaacctgcagtgagtaaaagagagacagtgggacagtccctccttcatcagacacagatgggtgacatctggccaggaagaaagatcattcaggagcggcagaaggagcccagtgtgctatttgaagtgccaaagctgaaaagtggaaagagtgcattggaagctgagagtgagagtctggatagcttcacagctgactcggatagcacctccaggagagactctctggataaatctggcctctttccagaatggaagaagatgtctgctcccaaatctcaagtagaaaaggaaactcagcctggaggtcaaaatgtggtatttgtggatgagggtgagatgatatttaagaagaacaccagaaaaatcctcaggccttcagagtacactaaatctgtgatagatcttcgcccagaagatgtggtacatgaaagtggctccttgggagacagaagcaaatccgtcccaggcctcaatgtggatatggaagaggaagaagaagaagaagacattgaccacctagtgaagttacatcgccagaagctagccagaagcagcatgcaaagtggctcctccatgagtacgatcggcagcatgatgagcatctacagtgaagctggtgatttcgggaacatctttgtgactggcaggattgccttttccctgaagtatgagcagcaaacccagagtctggttgtccatgtgaaggagtgccatcagctggcctatgctgatgaagccaagaagcgctctaacccatatgtgaagacttaccttctgcctgacaagtcccgccaaggaaaaagaaaaaccagcatcaagcgggacactgttaatccactatatgatgagacgctgaggtatgagatcccagaatctctcctggcccagaggaccctgcagttctcagtttggcatcatggtcgttttggcagaaacactttccttggagaggcagagatccagatggattcctggaagcttgataagaaactggatcattgcctccctttacatggaaagatcagtgctgagtccccgactggcttgccatcacacaaaggcgagttggtggtttcattgaaatacatcccagcctccaaaacccctgttggaggtgaccggaaaaagagtaaaggtggggaagggggagagctccaggtgtggatcaaagaagccaagaacttgacggctgccaaagcaggagggacttcagacagctttgtcaagggatacctccttcccatgaggaacaaggccagtaaacgtaaaactcctgtgatgaagaagaccctgaatcctcactacaaccatacatttgtctacaatggtgtgaggctggaagatctacagcatatgtgcctggaactgactgtgtgggaccgggagcccctggccagcaatgacttcctgggaggggtcaggctgggtgttggcactgggatcagtaatggggaagtggtggactggatggactcgactggggaagaagtgagcctgtggcagaagatgcgacagtacccagggtcttgggcagaagggactctgcagctccgttcctcaatggccaagcagaagctgggtttatgagtccctgtcctcttctgcaggtccagccctggcgagggcaggtcagaggaagtgaagaaatcaagagcaaagatttataatttaatgtgtatgtgtgtatgtgtgtatgtgtgtgtgtgtgtgtgtgtgtgtgtgtgtgtacaaacatgtattttctgcaaatctcattatgctggctagagtgatgcagacttgttcttctttttaaagcagtctcaagaataagcatttctttaaaatgtttctgtgtataatctagtttattttcagagtccattttttcttatgtctttataaggttcacttaacttaaaaacagcttttaaaacaactttttatcttctgtcttgctatcattgttcctacttccctaggaagccctggctacctttcgcattaggaccagtctgggttttaaggctctgggaagcagggttggttagtaaagacaggaatgttggggagaggtgagtagttccttcctctttctcctctccaatttatgcttttaacttattttctacctggataaacttctggaacttggcttttaaatttaacttttctagtttttaagcagtttccaccttgctttggtctaatgcttttctttgaaatgctaacagaattcccaagctttttccagttctagatatctttactagacctttgggggactcttataatggagctgcttttgaaaagcactttaattagataatgtattttgactaaatcacgaggatgcccagtgagagcttctagctgatctcagaggaccagagtgactgagggtaaagtgtctcacagcccatgctgaattttctgcattttaaactgatactgcagtcattggagagagagctcctcatttctcgaatgaaagatgagatatattcatcctcatgtaccacatctgtcttagtgtttgcgtctggggtgtgttatcaaacagagcatggtctacatcccactgtgtcaaccagaagagccaagtgttatctcaattggcccagtgtttctccaggctggggactgttaagggctctaagggaatgtagacagagtctccctgttattctgacttcctgcttgatgagctttcagttcctgtttttgctattgtttcctaaatttgacctacatattacatgggtgtagtgtgttgaggcttttcaaagaagggtctagtgagctaagtttcatcttctggtactcattgatcaaactgacctttctattctcataagcgtttctacccaaagttgtgtgtggaaggagtgtatagcagagaggaaatccctttcaacagagtcagctgctaactgatttcctataagcacactggattaagggcagccacagtggtttctactgtatgtatgaaccgaatggaggaatgttttcaaagattgatttggtgtggattgcaattgtaatggaaggcataacttgggatcccgggctgtaacttgctcttttgtttcccacccccctgacatgtatgtgtgctttaataaagctttctcacttgtcaaaaaaaaaaaaaaaaaaaaaaaaaaaaaa

SEQ ID NO: 1150 - DNA, 2284 bp, human
cggacacaggagaaagcagcgggtaggctaagcaggggtgctgaggatggaggaaagttgggaggctgagcacagctgaagtcctgagctccctgtgcccttgacttctctgtgggctcgagcaaggaccatcccaactcaggatgaaccctccttcggggccaagagtcccgcccagcccaacccaagagcccagctgcatggccaccccagcaccacccagctggtgggacagctcccagagcagcatctccagcctgggccggcttccatccatcagtcccacagcacctgggacttgggctgctgcctgggtccccctccccacggttgatgttccagaccatgcccactataccctgggcacagtgatcttgctggtgggactcacggggatgctgggcaacctgacggtcatctataccttctgcaggagcagaagcctccggacacctgccaacatgttcattatcaacctcgcggtcagcgacttcctcatgtccttcacccaggcccctgtcttcttcaccagtagcctctataagcagtggctctttggggagacaggctgcgagttctatgccttctgtggagctctctttggcatttcctccatgatcaccctgacggccatcgccctggaccgctacctggtaatcacacgcccgctggccacctttggtgtggcgtccaagaggcgtgcggcatttgtcctgctgggcgtttggctctatgccctggcctggagtctgccacccttcttcggctggagcgcctacgtgcccgaggggttgctgacatcctgctcctgggactacatgagcttcacgccggccgtgcgtgcctacaccatgcttctctgctgcttcgtgttcttcctccctctgcttatcatcatctactgctacatcttcatcttcagggccatccgggagacaggacgggctctccagaccttcggggcctgcaagggcaatggcgagtccctgtggcagcggcagcggctgcagagcgagtgcaagatggccaagatcatgctgctggtcatcctcctcttcgtgctctcctgggctccctattccgctgtggccctggtggcctttgctgggtacgcacacgtcctgacaccctacatgagctcggtgccagccgtcatcgccaaggcctctgcaatccacaaccccatcatttacgccatcacccaccccaagtacagggtggccattgcccagcacctgccctgcctgggggtgctgctgggtgtatcacgccggcacagtcgcccctaccccagctaccgctccacccaccgctccacgctgaccagccacacctccaacctcagctggatctccatacggaggcgccaggagtccctgggctcggagagtgaggtgggctggacacacatggaggcagcagctgtgtggggagctgcccagcaagcaaatgggcggtccctctacggtcagggtctggaggacttggaagccaaggcaccccccagaccccagggacacgaagcagagactccagggaagaccaaggggctgatccccagccaggaccccaggatgtaggacgcccactggctctccctttcttctgagacacatccagcccccccacgtctccctcatatacacagacccaggattatgctgtgagcctgcaggctttggaagtggccctgtcacccgtgctgcacgggattcacagccccagccccatggcccctctccacacctcaaaactcctgccccataacgtcctccgcatccactttccagctcagcagccgcacccgaggctcagcctgaggggtgtgtgcccaggccctcccacttcccgagttgtctgcctctcctcaaatgctgtgtgctgcaattgtccaggcgatgacaatggtgatggctccagagaacacaccagctatttatgagcctctgcccccaggctgggcctgtcactggcataggaaggccagccccgcatctcccactgccaacagctgaagccgagcacagacctccctttgcacgctggaacagttactcacctgtggcttcttcccccagtgtaccgttccactgtggcccacattcttgtgcacgcgggcatttgcaggcacgctctcgcgtagttacctatctgaatgcacaccaagcacatgcgtgcacactctgcgtctgtgattcatttcatgtagtggtctaagctcctcccagggctgtgtggatctgacagggtataggaaaataaaaagcggagaaggtgtcttcag

SEQ ID NO: 1151 - DNA, 2006 bp, human
gttgatggtgacagcagcagtgaccgtagcagcctagaggtggccgaatgcttactctaatgggctggcccatccctgagtgtctagagttcccagcccgcttaaggaaggaaggaaaacacaggcagctctaagtgtacgacgagggaggtctcatcggcggtgaggaagcccaggcgggtccccttcccagctgaaaggggttcggaatttcactctgtcgccaggctggaatgcagtagggcaatctcggctcactgcaacctccacctcccgagttcaagtgatgctcctgcttcggcctcctgagtagctgggactacagggactatgtcaccggtggggcttgccccagcaaggccaccatccctgggaagacggtcatcgtgacgggcgccaacacaggcatcgggaagcagaccgccttggaacttggccaggagaggaggcaacatcatcctggcctgccgagacatggagaagtgtgaggcggcagcaaaggacatccgcggggagaccctcaatcaccatgtcaacgcccggcacctggacttggcttccctcaagtctatccgagagtttgcagcaaagatcattgaagaggaggagcgagtggacattctaatcaacaacgcgggtgtgatgcggtgcccccactggaccaccgaggacggcttcgagatgcagtttggcgttaaccacctgggtcactttctcttgacaaacttgctgctggacaagctgaaagcctcagccccttcgcggatcatcaacctctcgtccctggcccatgttgctgggcacatagactttgacgacttgaactggcagacgaggaagtataacaccaaagccgcctactgccagagcaagctcgccatcgtcctcttcaccaaggagctgagccggcggctgcaaggctctggtgtgactgtcaacgccctgcaccccggcgtggccaggacagagctgggcagacacacgggcatccatggctccaccttctccagcaccacactcgggcccatcttctggctgctggtcaagagccccgagctggccgcccagcccagcacatacctggccgtggcggaggaactggcggatgtttccggaaagtacttcgatggactcaaacagaaggccccggcccccgaggctgaggatgaggaggtggcccggaggctttgggctgaaagtgcccgcctggtgggcttagaggctccctctgtgagggagcagcccctccccagataacctctggagcagatttgaaagccaggatggcgcctccagaccgaggacagctgtccgccatgcccgcagcttcctggcactacctgagccgggagacccaggactggcggccgccatgcccgcagtaggttctagggggcggtgctggccgcagtggactggcctgcaggtgagcactgccctgggctctggctggttccgtctgctctgctgccagcaggggagaggggccatctgatgcttcccctgggaatctaaactgggaatggccgaggaggaaggggctccgtgcacttgcaggccacgtcaggagagccagcggtgcctgtcggggagggttccaaggtgctccgtgaagagcatgggcaagttgtctgacacttggtggattcttgggtccctgtgggaccttgtgcatgcatggtcctctctgagccttggtttcttcagcagtgagatgctcagaataactgctgtctcccatgatggtgtggtacagcgagctgttgtctggctatggcatggctgtgccgggggtgtttgctgagggcttcctgtgccagagcccagccagagagcaggtgcaggtgtcatcctgagttcaggctctgcacggcatggagtgggaaccccaccagctgctgctacaggacctgggattgcctgggactcccaccttcctatcaattctcatggtagtccaaactgcagactctcaaacttgctcatttaaaaaaaaaaaaaaaaaa

SEQ ID NO: 1152 - DNA, 2619 bp, human
actagaaggaagaagtatggagttaaagactgcagcgtgaactgaggagtcccggacaggccgcttgctgcagaggatccagtccagatcccaggagagcccctctgccccttcggacctcgtctcccatctacaaaacgtgaagattggcccagttggcgtgtctctacaaaaaggtgcatataccactgccccgctgcaggctgatctgagaaagcctctggcccagggcagataccgccatggccttcctgatgcacctgctggtctgcgtcttcggaatgggctcctgggtgaccatcaatgggctctgggtagagctgcccctgctggtgatggagctgcccgagggctggtacctgccctcctacctcacggtggtcatccagctggccaacatcgggcccctcctggtcaccctgctccatcacttccggcccagctgcctttccgaagtgcccatcatcttcaccctgctgggcgtgggaaccgtcacctgcatcatctttgccttcctctggaatatgacctcctgggtgctggacggccaccacagcatcgctttcttggtcctcaccttcttcctggccctggtggactgcacctcttcagtgaccttcctgccgttcatgagccggctgcccacctactacctcaccaccttctttgtgggtgaaggactcagcggcctcttgcccgccctggtggctcttgcccagggctccggtctcactacctgcgtcaatgtcactgagatatcagacagcgtaccaagccctgtacccacgagggagactgacatcgcacagggagttcccagagctttggtgtccgccctccccggaatggaagcacccttgtcccacctggagagccgctaccttcccgcccacttctcacccctggtcttcttcctcctcctatccatcatgatggcctgctgcctcgtggcgttctttgtcctccagcgtcaacccaggtgctgggaggcttccgtggaagacctcctcaatgaccaggtcaccctccactccatccggctgcgggaagagaatgacttgggccctgcaggcatggtggacagcagccagggccaggggtatctagaggagaaagcagccccctgctgcccggcgcacctggccttcgtctataccctggtggccttcgtcaacgcgctcaccaacggcatgctgccctctgtgcagacctactcctgcctgtcctatgggccagttgcctaccacctggctgccaccctcagcattgtggccaaccctcttgcctcgttggtctccatgttcctgcctaacaggtctctgctgttcctgggggtcctctccgtgcttgggacctgctttgggggctacaacatggccatggcggtgatgagcccctgccccctcttgcagggccactggggtggggaagtcctcattgtggcctcgtgggtgcttttcagcggctgcctcagctacgtcaaggtgatgctgggcgtggtcctgcgcgacctcagccgcagcgccctcttgtggtgcggggcggcggtgcagctgggctcgctgctcggagcgctgctcatgttccctctggtcaacgtgctgcggctcttctcgtccgcggacttctgcaatctgcactgtccagcctaggcaggccgccgaccccgcccccatcgctcacggacggaactggggtccagagaggccaggtcacagagcaaggggcaggaacagagagacagagcctgagtaattgaatcatgaacgcaagtgcccactggggactgtggggaagatggcacctggaaatgcaaggtgcggctctatccccaactctgtgtcacactacctgtgacgaccagctcagatctcctttgctttgactctcaagagaggactgatttgcagcatctagctggaggcaggcccaagggtgttagaagggaaacagctgggacagccggctgtcccttcaggctgtgtgaccttgggaaagtcatttggcttctctgtgcctgtttcttcatgcatgcagtggggattccagtaagtaccaactacctcacaggcatggcacggaggcaaaaggaaaaagcagcccgcatcaagcaagccctcctgggccacctgctgatctgacagtccatcgtagtaacaagagtggcagtctgcacaacctagaagtggccagaagggttgagacacgcccctgccctctctcctttgcccctcagtctcacagaggggcttctacaagacaagcagataacgatagaatcttgggcatcttggctttcggattctcagtgtggagggacgtagtaccccacacaccccttcctgtcatccttcctggcccataaagcccactagttggagagtaagtaccctcctggaagcagggagagatgatttgctggtggggctggggaaggcccatccctgagcctctgaaagtgaactccccgaccaggttggggaccagacatgcagagcccctggaagtattctctcaaatggaggcaacagaggtgattgttattttgttttagtttctgtttttcatttttttaaataaaggcattccctgcttttaaaaaaaaaaaaaaaaaaaaaa

SEQ ID NO: 1153 - DNA, 1173 bp, human
cctctcttccagggctgccgtccacactctcccggtcagagtcctgggaccacatggggacgctgccatggcttcttgccttcttcattctgggtctccaggcttgggatactcccaccatcgtctcccgcaaggagtggggggcaagaccgctcgcctgcagggccctgctgaccctgcctgtggcctacatcatcacagaccagctcccagggatgcagtgccagcagcagagcgtttgcagccagatgctgcgggggttgcagtcccattccgtctacaccataggctggtgcgacgtggcgtacaacttcctggttggggatgatggcagggtgtatgaaggtgttggctggaacatccaaggcttgcacacccagggctacaacaacatttccctgggcatcgccttctttggcaataagataggcagcagtcccagccctgctgccttatcagctgcagagggtctgatctcctatgccatccagaagggtcacctgtcgcccaggtatattcagccacttcttctgaaagaagagacctgcctggaccctcaacatccagtgatgcccaggaaggtttgccccaacatcatcaaacgatctgcttgggaagccagagagacacactgccctaaaatgaacctcccagccaaatatgtcatcatcatccacaccgctggcacaagctgcactgtatccacagactgccagactgtcgtccgaaacatacagtcctttcacatggacacacggaacttttgtgacattggatatcacttcctggtgggccaggatggtggcgtgtatgaaggggttggatggcacatccaaggctctcacacttatggattcaacgatattgccctaggaattgccttcatcggctactttgtagaaaagcctccaaatgctgcagcgctggaggcggcccaggacctgatccagtgtgccgtggttgaggggtacctgactccaaactacctgctgatgggccacagtgacgtggtcaacatcctgtcccctgggcaggctttgtataacatcatcagcacctggcctcatttcaagcactgaaggaggccccactccctttgagactgccctccctcccctgctgggtctctccaaccctcaccagccaagctggctcagcaccttgtgtccccct

SEQ ID NO: 1154 - DNA, 1759 bp, human
gcgtccgcccacgcgtccgggcggggacggagctcggcgtgcttgctgctggagggtgatggccctgcaaggctgtgggctccgacctcaccgggagtcgacagcgagaggttcgccgaagagcgaggttctgggcgagcgctgaacgccggccccaagcaccccgggtctttacacagtccgcgtccacagactctgacgaagacgtggatctgctctcgctttagctgctcgcggtcctccagatcatgtccgcgactcctgcgactccgcgcggaaaaaaaagtttgccaggcgtggactcaatgacctttccaagctgtgcgcctcgctgcctggaccgggtctgagcgcggctgcccaggttgacctttctgcgggagggctttctctacgtgctgttgtctcactgggtttttgtcggagccccacgccctccggcctctgattcctggaagaaagggttggtcccctcagcacccccagcatcccggaaaatggggagcaaggctctgccagcgcccatcccgctccacccgtcgctgcagctcaccaattactccttcctgcaggccgtgaacaccttcccggccacggtggaccacctgcagggcctgtacggtctcagcgcggtacagaccatgcacatgaaccactggacgctggggtatcccaatgtgcacgagatcacccgctccaccatcacggagatggcggcggcgcagggcctcgtggacgcgcgcttccccttcccggccctgccttttaccacccacctattccaccccaagcagggggccattgcccacgtcctcccagccctgcacaaggaccggccccgttttgactttgccaatttggcggtggctgccacgcaagaggatccgcctgggatgggagacctgagcaagctgagcccaggactgggtagccccatctcgggcctcagtaaattgactccggacagaaagccctctcgaggaaggttgccctccaaaacgaaaaaagagtttatctgcaagttttgcggcagacactttaccaaatcctacaatttgctcatccatgagaggacccacacggacgagaggccgtacacgtgtgacatctgccacaaggccttccggaggcaagatcacctgcgggatcacagatacatccattccaaagaaaaacccttcaaatgtcaggagtgtgggaaaggattttgtcagtctagaactctagcagttcacaaaactttacacatgcagacatcaagccctacagctgcgagcagtgcggcaaagtgttcaggcgaaactgtgatctgcggcggcacagcctgactcacaccccgcggcaggacttctagagaagcccaggatctgtcccgtgccgccgctgctcccctccccagacacctctccacgtctcctacccagggggtcgcatccctagcccttcactgaccccagctcttcccttgctgcagccgcacctgcagctccagggagttaactcttcttctgggggactgagaactgtagaaagccacacactactacatcccttcacaaagagtatatgctagtttcttgtagatattcacagctcattttagagctctgtacataatgttgtgggtctttgttttgttgttttgtttgctttgggatcttgttggatgcacttagatatggaaaatggaagccaaattttatctttaaagactgtattttcaaaataaaactttttcttgtttgtttcaaaaaaaaaa

SEQ ID NO: 1155 - DNA, 2412 bp, human
atggctccgatcaacataggttctaaagtgacgtcatatgatacaaggacagcaccccaaattatgtttggttcagccctcggttcaggttccggggcgccgcagagctcccggcctctggaccgcgcgcggcgctctggggaatccggcgccacgcgccgtgcggtggccaggatggaggaggccggagcagcggtggtcacggccggggaggccgaactgaactggtcccgcctcagcgtgtccaccgagacgctggagtctgagctggaggcgcggggggaggagcggcgcggggcgcgggaggcgctgctgcggctgctgctgcctcacaaccgtctggtgtcgctgccacgggcgctgggcagcggcttcccgcacctccagctgctggacgtgagcggcaacgcgttgaccgcgctcgggccggagctgctcgctctgcgcggcctgcgcacgctgctggccaagaacaaccggctcggcgggcccagtgcgctgcccaagggcctggcccagtcgccgctctgccgcagcctccaggtgctcaacctcagcggcaactgtttccaggaggtgcctgcctcgctcttagagctgcgcgcgctgcagaccctgagcctgggcggcaaccaactgcagagcatcccggctgagatcgagaacttgcagagtttagagtgtttatatcttggaggaaatttcattaaagaaatcccaccagaattaggaaatctgccttctctgaattatttggtattatgtgacaacaaaatccaaagcatacctcctcaactttcacagttacattcacttcgttccctaagtcttcacaataacttgctgacatatctgcctcgagagatcctcaaccttattcatttggaagagttgagtttacgaggaaatccattggttgttcgttttgttagagatttaacctatgatcctccaactctcctggaattagctgcacggaccattaagattcgaaatatttcctacactccctatgatcttcctggaaatcttcttagatacttgggttcagccagcaattgcccaaacccaaagtgtggaggagtctactttgactgctgtgtcagacaaattaaatttgtggacttctgtgggaagtatcgcctcccactgatgcactacttgtgttcaccagaatgttcttccccttgcagttctgcctctcacagctccacttcccagagtgaatctgactcagaagatgaagctagtgttgctgcacgcagaatgcagaaagttcttcttggttgaacaggagtgcacagtgttgtgaaatacttaaaaaactgagcaaaatggttagacaagaaaatagagcttgaagttcactagaaatcttatcttcatcttaagtgttcatcaaagagtctgggatgatataaaacattttgtgtttcatctacccattcagcaagaatgagtccagtcccatgtttagattattttaacataatttgtgaatgatagtttcacatttggctgatggtttgcagttttcactcaagttttgcatgaatcacaaagcagaatggtaccttttgaagagcagttctgcaataagtcatgagtagtataacttttggacattgagatggagaaagtgagaaattatcaaagctataattgccagagttgcccttgggtttaggtagaacactgtataccatatatactatataccatatatactatatataccatatatattatatgccataaacaggattaaccctcccttttctaattgcctgtatgtctagattacagaactattcaaagaagctcacagatggttacatgggacaaacctttctgacaaactaactggtaaagtaaggcatataacatttacatgagatattaaaactttttcattattatcctttgttctatatgattgctattaaccttatgtaatctagcaatgactgttatagtgccttaatccagcaaggatataaaaatgtattcaagaagtaatgccagagcaacctataacctgacataccatgcagaacattgtaaaatattctttaacagaactaggtaaataactgtgtatctaatatccgatctcatggccctcttaacatttttttgtttaaatgtgcactcatcccttataagcacattacttttacacttaatggtaggccacaatcttcatcaatctgttcatcataagacagagtaagaatttttaacagaaaattctaaaagagatagaagctaggaaagcttctttatatcttgcattaaatgggtagggaaaaaatatgactctcacccatgtcatgtactggaccatctttctctactttttaaagaaaaactaatacaactagaaaaacatcacaacaagccaaataaaaa

SEQ ID NO: 1156 - DNA, 615 bp, human
gcacttgcaagctgcccgcaatacgtcatggcgaccaaacgccttttcggggctacccggacgtgggccggctggggggcctgggagctcctaaaccccgccacttccggaagactcctggcccgggattatgccaagaaaccagttatgaagggggccaaatcgggaaaaggtgcagtgaccagcgaggccctcaaggaccccgacgtatgcacagatcctgtccagctcaccacatatgccatgggcgtcaacatctacaaggaagggcaggatgtacccctgaaaccggatgctgagtaccctgaatggctgttcgagatgaacttgggtcccccaaagaccctggaggagctggaccccgagagccgggagtactggcggcggctgcggaaacagaacatctggcgccacaaccggctgagcaagaacaagaggttgtagcatggagggcccggcatcgctgacccccacgccgagggcttgccgttttcccggaggacgtggacttttgtgagacaagaggcggctccccagcctgggtttccatgtgaccccacagtggggctggaccaggccctggaggccaataaagagctttctgggtaaaaaaaa

SEQ ID NO: 1157 - DNA, 4078 bp, human
gcgactcggtcccaggtcggcgggcggcgcgcggcgggctcgcgcgggggccccggcgcgccgggcggcgcagtacgcagcgcgcggacccacgccacggccaggagcccagagcagcgcggccacactgcccaggggtcggccctcggccccggcgctcggagcgcggcggctgcctgggctttaatggctgctccgcggagcagcgcctagggctggaaggcggctgcggctcaggaagtcacccgagcaagcctccttcggggccggccgcacccgccgcggcgcgctccatgggggcgcgctccccccgggcggcccgctgacccgggacgccggggcccgctcgctcgccggccgcgcgtcccggccatgaactgagcccgcgggccagccccgcgcctgctccgcccgcgcctttcttctcgcgcctcctccgcccgccgccggcgggcccggctccccgggggctgcggcgccccgggctcggcggcccgcgggccccggggcgcggggcggcggcggcggggggcgcgcggctccgggcgcggcgcctgcaccatgaactaccagcagcagctggccaactcggctgccatccgggccgagatccagcgcttcgagtcggtccaccccaacatctactccatctacgagctgctggagcgcgtggaggagccggtgctgcagaaccagatccgggagcacgtcatcgccatcgaagatgccttcgtgaacagccaggaatggacgctgagtcgatctgtcccggagctcaaagtgggaattgtgggtaacttggccagcggcaagtctgccctggtgcaccggtacctgacgggcacatatgtccaggaggagtctccggaaggtggcaggttcaagaaagagattgtcgttgatggacagagctatctgctgctgatcagagatgaagggggccccccggaggcgcagtttgccatgtgggtggacgctgttatatttgtcttcagcttggaggatgaaataagtttccagaccgtttaccactactacagtcgaatggccaactatcggaacacgagcgagattcctctggttctggtgggaacccaggatgccataagttctgctaacccgagggtcatcgatgacgccagggcgaggaagctctccaacgacctgaaacggtgcacgtactacgagacgtgtgctacatacgggctgaatgtggagagggtcttccaggacgttgcccagaagattgttgccacaaggaagaagcagcagctgtccataggaccctgcaagtcgctacctaattctcccagccattcctccgtctgttccgcgcaggtgtctgccgtgcacatcagccagacaagtaatggaggtgggagtttaagcgactattcctcctccgttccatcgactcccagcatcagccagaaggaacttcggatcgatgttcctcccactgccaacacgcccacgcccgttcgcaagcagtctaagcgccggtccaacctgttcacctctcggaaagggagcgacccagacaaagagaagaaaggcctggagagtcgtgcggacagcattgggagcggccgagccatcccaattaaacagggcatgctgttgaagcgaagtggcaaatcgttgaataaagagtggaaaaagaaatatgtcaccctgtgtgacaatggcgtgctgacctatcatcccagtttacatgattacatgcagaatgttcatggtaaggagattgaccttctgagaaccactgtgaaagtcccagggaagaggccaccccgagccacgtcagcctgcgcacccatctccagccctaaaaccaatggcctatccaaggacatgagcagtttacacatctcacccaattcagacacagggctgggtgactccgtatgctccagccccagtatctccagcaccaccagccccaagctcgacccgcccccctcccctcacgccaacagaaagaagcaccgaaggaagaaaagcactagcaacttcaaagccgacggcctgtccggcactgctgaagaacaagaagaaaattttgagtttatcattgtgtccctcactggccaaacatggcactttgaagccacgacgtatgaggagcgggacgcctgggtccaagccatcgagagccagatcctggccagcctgcagtcgtgcgagagcagcaagaacaagtcccggctgacgagccagagcgaggccatggccctgcagtcgatccggaacatgcgcgggaactcccactgtgtggactgcgagacccagaatcccaactgggccagtttgaacttgggagccctcatgtgcatcgaatgctcagggatccaccggaatcttggcacccacctttcccgagtccgatctctggacctggatgactggccaatcgagctcatcaaggtgatgtcatccatcgggaacgagctagccaacagcgtctgggaagagagcagccaggggcggacgaaaccatcggtagactccacaagggaagagaaggaacggtggatccgtgccaagtacgagcagaagctcttcctggccccgctgccctgcacggagctgtccctgggccagcacctgctgcgggccaccgccgacgaggacctgcggacggccatcctgctgctggcacacggctcccgggacgaggtgaacgagacctgcggggagggagacggccgcacggcgctgcatctggcctgccgcaaggggaatgtggtcctggcgcagctcctgatctggtacggagtggacgtcacggcccgagatgcccacgggaacacagctctggcctacgcccggcaggcctccagccaggagtgcatcgacgtgctgctgcagtacggctgccccgacgagcgcttcgtgctcatggccacccctaacctgtccaggagaaacaataaccggaacaacagcagtgggagggtgcccaccatcatctgaggaacagccgtgcccgcctgctcgccgcacctgggacgcggcagcctcgccgcattctcgctcagaagtcgcagcacgtgagtcccgtcgcatcccctccctcttcctggtggccacctccctcccgcccacccactctcaccccaaacaaaatcacaaaacctggacatccctcaaggggcgaagaggcggccgggagactgcagaagtggctccttttcataaactcccctaaaccacacacaggagagagcgacgggcctcggccctttgatgatagcacatggcgcaggacccttgtcctggtggcacaagggatggggacgcgagggggaggggaggcgaggaacaaggagaaggggcaactttccttaactggcagttgagcacatagtacatttcccctctaccaaacggaacacttggattccatctcttctctgaggagctcgacggcataaatcagaagcaagcacagagtttgtcaggtttgaagcccctatgatggtgtgtgtcaaatcagttgtagctaatctgtccagggagaatactggcttcattacacttgtacagccgagttcttcccgcattactgctgtttaatagaacgtgattagtcatcgccgagaagaaagcatattagccgaggaggtagtcacgcggcacgcgccggtgattgccacgatgtgattgcaatactcttagaagcaccatattatcccagacatgttctttcaagcccttggagccctctctaaattcactgtcatcatttagtatctgtttaatttttcagtccaaagagaggaaatcagtcgctgagtattatttgactccggtctccttggtgcaaaaacaaaatgggaaaaataaataagaataactcagaaactcaaaaggaaaccacaaattcagctaataatagcatttcgagtatatttcgtaaactaaggaaatacacaaaaggctgtttttttccgactgtaagagatatttgatgtccttttgccgaggtggatgtgttagtctcaggccctcctggaccacgttgcccaagtcacacaggcttctgtgttatgtatttagataagatgtgtgaaaa

SEQ ID NO: 1158 - DNA, 2488 bp, human
cgctgccagcccgcccgccagccaggggctccgccgccctcgcctcggcctcgttagcccgccaggagccccgcagctcctccgggagcccgctggtaactcgcgtccctcgcgcttctccggcgcctgaggggcccgcctcgggccatggtgctctcccaggaggagccggactccgcgcggggcacgagcgaggcgcagccgctcggccccgcgcccacgggggccgctccgccgcccggcccgggaccctcggacagccccgaggcggctgtcgagaaggtggaggtggagctggcggggccggcgaccgcggagccccatgagccccccgaaccccccgagggcggctggggctggctggtgatgctggcggccatgtggtgcaacgggtcggtgttcggcatccagaacgcttgcggggtgctcttcgtgtccatgctggaaaccttcggctccaaagacgatgacaagatggtctttaagacagcatgggtaggttctctctccatggggatgattttcttttgctgcccaatagtcagcgtcttcacagacctatttggttgtcggaaaacagctgtcgtgggtgctgctgttggatttgttgggctcatgtccagttcttttgtaagttccatcgagcctctgtaccttacctatggaatcatatttgcctgcggctgctcctttgcataccagccttcattggtcattttgggacactatttcaagaagcgccttggactggtgaatggcattgtcactgctggcagcagtgtcttcacaatcctgctgcctttgctcttaagggttctgattgacagcgtgggcctcttttacacattgagggtgctctgcatcttcatgtttgttctctttctggctggctttacttaccgacctcttgctaccagtaccaaagataaagagagtggaggtagcggatcctccctcttttccaggaaaaagttcagtcctccaaaaaaaattttcaattttgccatcttcaaggtgacagcttatgcagtgtgggcagttggaataccacttgcactttttggatactttgtgccttatgttcacttgatgaaacatgtaaatgaaagatttcaagatgaaaaaaataaagaggttgttctcatgtgcattggcgtcacttcaggagttggacgactgctctttggccggattgcagattatgtgcctggtgtgaagaaggtttatctacaggtactctcctttttcttcattggtctgatgtccatgatgattcctctgtgtagcatctttggggccctcattgctgtgtgcctcatcatgggtctcttcgatggatgcttcatttccattatggctcccatagcctttgagttagttggtgcccaggatgtctcccaagcaattggatttctgctcggattcatgtctatacccatgactgttggcccacccattgcagggttacttcgtgacaaactgggctcctatgatgtggcattctacctcgctggagtccctccccttattggaggtgctgtgctttgttttatcccgtggatccatagtaagaagcaaagagagatcagtaaaaccactggaaaagaaaagatggagaaaatgttggaaaaccagaactctctgctgtcaagttcatctggaatgttcaagaaagaatctgactctattatttaatatcttacatacctccaccagactggacttgctttttgaattttaagcaagtttcctttccttttatacaaattgcaaatttcatatttttttaatcacatcctaggaatagcacaataattgggaaatagaacccttatcactagaagaaccattttctgccactaaatatctctgatgtttccatgagtctgagggcagagactctggtatatgaaaacatgtctgaaagtcacatattgtgaaaatttgaagctatctcagtaaaaagcagctttggaaactgtgaatgatctttagcttgtacaaatgtttaaaaatacctcaggctatactgaaagggttgcagtttggttaggagtggaaatattttgtttgttaatgatgtcttcagttctggtacctctgttttactttcttatgctctttggaaactttttgcaaaatttaagcctgggttctagataataccagatctacctaaacctcaagtctatgttaaagttgctttcctgctgttaaataagctatgatattaagatattctgacttgctccagtgtcaagggaccttctgggagcaggtgccaacatagtgttcagaatcaatatgtgagatgaaaaggatcccctccaggaggatcctgagctgttcagaaatcatttaagtttacagcgttgttccctttgcgtttgcagtgcgttttactcaagtagccagaaacaccccacgtttctgaatttgtttaaactgtaacaataaagtaaaatagaatgcaaaaaaaaaaaaaaaa

SEQ ID NO: 1159 - DNA, 2608 bp, human
agacctcccgcaccagggctctggtgaacagcaaatgctccacgctgggacgggccattgcctgatgcctgtacatggtgggcactgagagacaagattcctgggccctgccttccatacactccccacgatcttggaggaagctctgaggaccccgctgagaacccacagacaggaggacaactgcgctatgacagcaataaaggccaagaaggagaaagttgaggaccgctgacagccccgtgtgctgttgggagctgccctttctacttcaaaccttcctctagcagactgtgcagggaccccccaccaccaccatctgccgccatggttgtgcaaaacagcgcagacgccggggacatgagggcaggcgtgcagctggagcccttcctgcaccaggtcggggggcacatgagcgtgatgaagtatgacgagcatacggtgtgcaagcccctcgtctcccgggagcagaggttctatgaatccctgccgctggccatgaagcggttcaccccacagtacaaaggtaccgtcacagtgcacctctggaaagacagcacaggccatctcagcttggttgccaacccagtgaaggagagccaggagcccttcaaggtctccacagagtcggcggcggtggccatatggcagacgctccagcagaccaccggcagcaatggcagcgactgacccttgccagtggccgcatgcccagctggcacgctcacccaaggagagcccggccaaggctcttctgaggtccgagccccacctcaacactccagccttctcgctggtggaagacaccaacggaaaccaggttgagaggaagagcttcaacccgtggggcctgcaatgccaccaggcccacctgacccgcctgtgctccgagtacccagagaacaagcggcatcggttcttgttgctggaaaatgtagtgtcacagtacacgcatccctgtgtcctggatctgaagatggggacccggcagcacggcgatgatgcatcggaggagaagaaggcccgccacatgaggaagtgtgcgcagagcacctcagcctgcctgggtgtgcgcatctgcggcatgcaggtttatcaaacagataagaagtactttctctgcaaagacaagtactatggaagaaaactctcagtggaggggttcagacaagccctctatcagttcctacataatggaagccacctccggagggagctcctggagcccatcctgctccagctccgggccctcctctccatcattaggagccagagttcataccgcttctattccagctctctccttgtcatctatgatgggcaggaaccaccagaaagagccccaggcagcccgcatcctcacgaggctccccaggcagcccacggtagctctcccggtggtctcaccaaggttgacatccgcatgattgactttgctcataccacatacaagggctactggaatgagcacaccacctacgatggaccagaccctggctatatttttggcctggaaaacctcatcaggatcctgcaggatatccaagagggagaatgaaacttcctgggcttatctggattcttctgggctatagatctcaaatagagacctgttggttgctagggtagtccagacaccccttagatgtcttcataatagtcctatctaccttcaaaaaccatctctatatatggcagactatattaacagctgctgaacaaatcagctctggaggtgattccacatcccctggcattatgctctaatgctgcttatcggagaacagacagccaggataaagtggcaccttctggagtacactggagggggcagcccaagttagaggccagcattgctgacattctggaatatttgcatctaaaaatgtttactcgttgccatgctgcagtccgcacaagctgtgaggcagaaaacttgacttgaagcagccttgaagagtgagttcatgagctcatggtttttctccttgtatggactgctcgctccaagggcaggcagagctcatgaatgcctcttatcttcctaagcggagttttaggtgacacaggatgaagcagaagagatctacccatctcacctgctctgcacccagcttctaagtggacaaagccaagcccaggcatgagctctggcaaagcaagaccccagattctccatttttgcctgtggaaaggagggtccctttacaggcttttttttcctttttttcccccaaaatctcttaaaatgaggaatctcttagcagactttggagttccccattctgccacattctgaccatgagacacggcttgcagtgggggtgaacgcacataaaaagggaccactgacgtcctgctctactctctgctttctatttatttattttgggggtgggttggggagtcagaagaacctggaggacggaggaaaccaggggcaatgtttacaagactggtggacaagtgtaaatatggaataagaacaaacagttctaattaattccttcttctgcagtacggaaacctattacaatgcccttgagtcaagcactgagatacgttacccaattagggaaataaatttgttaataaaattgctgaggtc

SEQ ID NO: 1160 - DNA, 4516 bp, human
gaggagtggggcaggctcggcgccggtaggaagagtcagaggggtgaccagagagcccaacgcctggtgctcaagactttctccgagctatgaaacccacgtagtcgaacaccgtgatgcttctcctgcagggcgtgtgatgaggaggcgagcttggctttggagtgctgggaacctgaggaattgccaaggacccagagcccagccctgaccaccagagtgcccaaaacacaatgaacaaattgaattttcataacaacagagtcatgcaagaccgccgcagtgtgtgcattttccttcccaacgatgaatctctgaacatcatcataaatgttaagattctgtgtcaccagttgctggtccaggtttgtgacctgctcaggctaaaggactgccacctctttggactcagtgttatacaaaataatgaacatgtgtatatggagttgtcacaaaagctttacaaatattgtccaaaagaatggaagaaagaggccagcaagggtatcgaccaatttgggcctcctatgatcatccacttccgtgtgcagtactatgtggaaaatggcagattgatcagtgacagagcagcaagatactattattactggcacctgagaaaacaagttcttcattctcagtgtgtgctccgagaggaggcctacttcctgctggcagcctttgccctgcaggctgatcttgggaacttcaaaaggaataagcactatggaaaatacttcgagccagaggcttacttcccatcttgggttgtttccaagagggggaaggactacatcctgaagcacattccaaacatgcacaaagatcagtttgcactaacagcttccgaagctcatcttaaatatatcaaagaggctgtccgactggatgacgtcgctgttcattactacagattgtataaggataaaagggaaattgaagcatcgctgactcttggattgaccatgaggggaatacagatttttcagaatttagatgaagagaaacaattactttatgatttcccctggacaaatgttggaaaattggtgtttgtgggtaagaaatttgagattttgccagatggcttgccttctgcccggaagctcatatactacacggggtgccccatgcgctccagacacctcctgcaacttctgagcaacagccaccgcctctatatgaatctgcagcctgtcctgcgccatatccggaagctggaggaaaacgaagagaagaagcagtaccgggaatcttacatcagtgacaacctggacctcgacatggaccagctggaaaaacggtcgcgggccagcgggagcagtgcgggcagcatgaaacacaagcgcctgtcccgtcattccaccgccagccacagcagttcccacacctcgggcattgaggcagacaccaagccccgggacacggggccagaagacagctactccagcagtgccatccaccgcaagctgaaaacctgcagctcaatgaccagtcatggcagctcccacacctcaggggtggagagtggcggcaaagaccggctggaagaggacttacaggacgatgaaatagagatgttggttgatgacccccgggatctggagcagatgaatgaagagtctctggaagtcagcccagacatgtgcatctacatcacagaggacatgctcatgtcgcggaagctgaatggacactctgggttgattgtgaaagaaattgggtcttccacctcgagctcttcagaaacagttgttaagcttcgtggccagagtactgattctcttccacagactatatgtcggaaaccaaagacctccactgatcgacacagcttgagcctcgatgacatcagactttaccagaaagacttcctgcgcattgcaggtctgtgtcaggacactgctcagagttacacctttggatgtggccatgaactggatgaggaaggcctctattgcaacagttgcttggcccagcagtgcatcaacatccaagatgcttttccagtcaaaagaaccagcaaatacttttctctggatctcactcatgatgaagttccagagtttgttgtgtaaagtccgtctgtgtgcagctgtacaggcagcttactgtttgctagaggatgcgaaagtcataagttctttacatattacttgtgccatatcttcttcaccctaaacatagctctttctttataatatttgtgatgatggaaacaaaagccttggaacaattgcactttaagtattacacagaagtaaaagaactacagaaaatgtacagcaagacaagtgcccggaagttcactgatccttcagaaggaaatgcgctttactgattgcaaagccttcagaatattggagtgtggtgtgtttgctcatctgatgctttttagttcagttacatgtaacatcacattttttatcacgtgaaagatgttagatttgtttgcttataaattttttaccactcccacataaaatgctcatagtttgggagaggaaagagggaagattctctcttcttttaacagagagatgattgctctgtatacccattgcttcctccctgaggctgtcccaaagtgaacactgatggagtggtcaaaatcataaggttgtagcaagccaaagatacgtatgtgacagaagcacataagcaataagcagaaaaccagaagtgcatgctgtgatgcctgtgactccttcatcccgctcagtgccatgtcctcttttgtgatcttccagaaagctccaggattcatttgagttccacatccaagtaacagatgaattatattcatgttgtaatgcattttgtggagtttacaaaaccagtgtctgttaaaactttggaaaatgtcttagaaaacgttggtgcttggtgatgctttatttgtttaattatcaagaacaaattatggcaatgctagtttctgcttaaccaaaatactctgtgtatatattatacatatataaatacatgggattgtgtatgtctatatgtgtttaaagcttactatgtcttcattttggcttccatgactatcttttatacatggaattccttaagattgagaatatgtcactgagtgaatgatacctgcagacagtcagttgatatatgtagagttcagaatgactgttttctcatgtgcctttggccatgattctcaacactgattgtataacagaattttggggggagcttttaaaaaataatgactgagtctcccaccagaccgattacatcattctcttgtggcgggacccaagtagaattgccttttcttttaaagttctccagatggagctaatatgcaacaaagttgaaaaccactgatcctgggggtgtcttgttaattttgaagtaaaagtgtacagaagacgtagtgtatgagaaagggccatttttaagacagttacctgttgtgctgctgttacaatatataatgaaaccaagtcaggggagtgaatttatcaatcttttgatgtaaagtaaaaacgtagttcacacttcaggagagaacttcatagcacaatgtctttctataagatatttttaatgatttagtattttacaacatttgtttaccatattttgatataccatttttttctatctgcccagttttattaaaaaaactatatattattttctaaagaaacaatcatatttttatacaaaattatgttttcaggtaacgaaatagatgtagggtacagtggaacataagcagtgttacccctggctgggagtcagtattatacaacaaatggtgagctggaacatgccctgtctgtgctgtccctcctgtgctgggtcgcggatgtgtaggcaacattgccttatcacgctaggttcacctgacactttaaaaggaaaaaaagttccatagagttctgtggtcacaaaattgttttgcttttatcaaatactttaatagaaccaaagttgcagatattggaatgtatggaagtatctcagtctctgcataagaggattaaagtatgaaaggatcatttaatgactgttttacttataagtcattaagtaatccaccatttcttatggatgatgcttaagcctggtgaggtttgtactctaaggagcccagatcataatgcagtgcatttccttagcccttagagtttcttgcaaacatttaaaaaaagacatatttaagaaagaagataaagaaaaaacatatttaattactgtaaacaggtactgctttatgtttattttctctctacttcaaccaaaatcagatctttgaggttttgctgacattgttggtggttttgcacatgttctttctaattggatttatgaatagttctatgggttttcaaagatgaatcatgctaagaacacttctgctttttgatccactgtttgcagcagaattatatatatgtataggaaaaatccactttgaataatccatgttttgtatttggaaattgtttttaaaaataaaaaggaaaggaaatataaaaaaaaaaaaaaa

SEQ ID NO: 1161 - DNA, 2162 bp, human
gcggacgtgagcgataatggcggatatggaggatctcttcgggagcgacgccgacagcgaagctgagcgtaaagattctgattctggatctgactcagattctgatcaagagaatgctgcctctggcagtaatgcctctggaagtgaaagtgatcaggatgaaagaggtgattcaggacaaccaagtaataaggaactgtttggagatgacagtgaggacgagggagcttcacatcatagtggtagtgataatcactctgaaagatcagacaatagatcagaagcttctgagcgttctgaccatgaggacaatgacccctcagatgtagatcagcacagtggatcagaagcccctaatgatgatgaagacgaaggtcatagatcggatggagggagccatcattcagaagcagaaggttctgaaaaagcacattcagatgatgaaaaatggggcagagaagataaaagtgaccagtcagatgatgaaaagatacaaaattctgatgatgaggagagggcacaaggatctgatgaagataagctgcagaattctgacgatgatgagaaaatgcagaacacagatgatgaggagaggcctcagctttccgatgatgagagacaacagctatctgaggaggaaaaggctaattctgatgatgaacggccggtagcttctgataatgatgatgagaaacagaattctgatgatgaagaacaaccacagctgtctgatgaagagaaaatgcaaaattctgatgatgaaaggccacaggcctcagatgaagaacacaggcattcagatgatgaagaggaacaggatcataaatcagaatctgcaagaggcagtgatagtgaagatgaagttttacgaatgaaacgcaagaatgcgattgcatctgattcagaagcggatagtgacactgaggtgccaaaagataatagtggaaccatggatttatttggaggtgcagatgatatctcttcagggagtgatggagaagacaaaccacctactccaggacagcctgttgatgaaaatggattgcctcaggatcaacaggaagaggagccaattcctgagaccagaatagaagtagaaatacccaaagtaaacactgatttaggaaacgacttatattttgttaaactgcccaactttctcagtgtagagcccagaccttttgatcctcagtattatgaagatgaatttgaagatgaagaaatgctggatgaagaaggtagaaccaggttaaaattaaaggtagaaaatactataagatggaggatacgccgagatgaagaaggaaatgaaattaaagaaagcaatgctcggatagtcaagtggtcagatggaagcatgtccctgcatttaggcaatgaagtgtttgatgtgtacaaagccccactgcagggcgaccacaatcatctttttataagacaaggtactggtctacagggacaagcagtctttaaaacgaaactcaccttcagacctcactctacggacagtgccacacatagaaagatgactctgtcacttgcagataggtgttcaaagacacagaagattagaatcttgccaatggctggtcgtgatcctgaatgccaacgcacagaaatgattaagaaagaagaagaacgtttgagggcttccatacgtagggaatctcagcagcgccgaatgagagagaaacagcaccagcgggggctgagcgccagttacctggaacctgatcgatacgatgaggaggaggaaggcgaggagtccatcagcttggctgccattaaaaaccgatataaagggggcattcgagaggaacgagccagaatctattcatcagacagtgatgagggatcagaagaagataaagctcaaagattactcaaagcaaagaaacttaccagtgatgaggaaggtgaaccttccggaaagagaaaagcagaagatgatgataaagcaaataaaaagcataagaagtatgtgatcagcgatgaagaggaagaagatgatgattgaagtatgaaatatgaaaacattttatatattttattgtacagttataaatatgtaaacatgagttattttgattgaaatgaatcgatttgcttttgtgtaattttaattgtaataaaacaatttaaaagcaaaaaaaaaaaaaaaa

SEQ ID NO: 1162 - DNA, 3572 bp, human
ggggagcccgtttgttccgcccgtgtcgagcctggagccagaacctgtgaagagcggaagggccaagggacgtcttctccacgccgctccgactccaggggagccgtggcctcctctccgccctagcgctgagaaccgtgggtaccgatggatgtggccgagagccctgaacgggatcctcactctccagaggatgaagagcagccacagggactctcggacgatgacattctgagggacagcgggtccgatcaggatttggacggggcgggggtgagggcttctgatctggaggatgaggaaagtgcagccagggggccgagccaggaggaggaagataatcactccgacgaggaggaccgggcaagtgagcctaaatcccaagaccaggactcagaggtgaatgagctgagccggggcccgaccagctccccctgcgaggaggagggggacgaaggggaggaagaccggacaagcgaccttagggatgaggcctcctcagtcaccagggagctggatgagcatgagctagactacgatgaggaggttcctgaggagccagctcccgccgtccaggaggacgaggctgagaaagcgggggctgaggatgatgaggagaagggcgaaggcactcccagggaggaggggaaggctggtgttcagagtgtgggagaaaaggaatccctggaggctgccaaggagaaaaagaaagaggacgatgatggagaaatcgatgatggggaaatagacgatgatgacctggaagaaggtgaagtgaaggaccccagtgacaggaaggtgaggcctcgtcccacctgccggttcttcatgaaagggaactgtacctggggaatgaattgtaggtttatacaccctggagtgaacgacaaggggaactactccctaatcaccaaagccgaccccttcccgcctaatggtgccccgcctctcggacctcacccgctgatgcccgccaacccttggggtgggccggtagttgatgaaattttgcctccaccccctccagagcccccaacagagagtgcctgggaacgaggactccggcatgcaaaggaggttttaaaaaaagcaactattcgaaaagaacaggagcctgattttgaagagaaaaggtttacggtgaccattggcgaagacgaacgggaatttgacaaagaaaatgaagtttttcgagattggaattctcggatcccgagagatgtcagagacacagtactcgagccttacgcagacccttattatgactatgaaattgagcggttttggcgtggcggacagtatgagaatttcagggtgcagtatacagaaacagagccgtatcataattaccgagaaagggagcgggagcgagagagagagaacagacagcgcgagcgcgagcgggagcgggagcgggaccgagagcgggagcgccggcagagggagcgcgagcgagagcgggagcacgagcgcgacaaggagcggcagcggaggaaggaggagtgggagcgtgagcgagccaagcgggacgagaaggaccggcagcaccgtgaccgcgaccgggagaaggagcgggagaaggagaaggggaagcccaagccccgctccccgcagccgccaagccgccaagctgagccaccaaagaaggaggctgccaccacggggccgcaggtgaagagagcagatgagtggaaggacccttggcgccgatccaagtctcccaagaagaaactcggggtgtcggtctccccgagccgggctcgaaggcgtcggaaaacatcagcctcgtcagcctctgcctctaattcctccaggtcgtcttcgcggtcatcgtcctactctggctccggctcctcccggtcgcgatcccggtcttcatcctacagctcctactccagccgctcttccagacacagctcgttctcaggaagccggtccaggtcccggtccttctcttcgtccccgtccccgtccccaacaccttccccacatagaccttccatcagaaccaagggagagccggccccgccgcccgggaaagcaggagagaagtcagtgaagaagccggccccgcctccagccccaccacaggccaccaaaaccactgctcctgtccccgagcccaccaagccaggagaccctcgggaagccaggaggaaggagcggccagccaggaccccccccaggaggcggacgctaagcggcagcggcagtggcagtggtagcagctatagtggttccagctcccgatccaggtccctgagcgtgagcagcgtctcctcagtgtccagtgctacgtcgagcagcagctctgcacacagcgtggactcggaggacatgtacgcagacctggctagccccgtgtcctcagccagctctcggtccccggccccagcccagaccaggaaggagaaaggaaaatctaagaaagaagacggtgttaaagaggaaaagcggaaaagggattcgtccacacaaccacccaaatctgcaaaacctccagcaggggggaagtcctcccagcagccctcgacaccccagcaggcaccccccgggcagccccagcagggcacatttgtggcccacaaggagatcaagttgacactgttgaataaggcggctgataaaggaagcaggaagcgctatgaaccatcagacaaggacaggcagagccctcctccagccaagcggcccaacacatccccagaccgaggttctcgggaccggaagtcaggtgggagactgggctccccgaagccagagcggcagagaggccagaactccaaagcccctgcagccccggctgacaggaagcgccagctgtcaccccagtccaagagctccagcaaggtcacgagcgtgcccggcaaagcctcggatcccggcgccgccagcaccaaatcagggaaggccagcacgctgtctcggcgggaggagctgctgaaacagctgaaggccgtggaggatgctattgcacgcaagcgggccaagatccccgggaaagcataggccgtgccccgaccggactggacgcatttttatacatagggtaagcgcagccattttggattttgcagttaatgtcttattttggctgtgattctttttaaaaagtaaaaaagaaaaaaaagtttctcagctggaaaagaagccacacaggaaatgacaacgacgctgaatcccagcctccctccccagagcagaagtcccgcaggacagacagacacagacagcgctagtgaccagcacggttctcatgtaaattacaagccccagccgccagccccgccttctcttcctcctcctccgtcttcttccctggccctggtcaggcctgtggagccccagctctgggtccctagcccgggtccaggcagccaggctccctcctgagctgagaaacggaacctcgcgaaccactggtggcacatccttctcctcccccgcccctgatcacccgcccccggatcagaaatatatctatattctcgactaaagtctcatcaggaaatatttcctgtcttttattttaagcatcaaattgttttagttgatttaaaaaaaaaaaaaaa

SEQ ID NO: 1163 - DNA, 2212 bp, human
ttttcgcccgctgctgccgccgccgccgccggccgcggctgcactcccaagatggcggctcctccgggcgagtacttcagcgttgggagccaggtgtcgtgccggacgtgccaggagcagcggctgcagggcgaggtggtagcctttgactaccaatccaaaatgctggctttaaaatgtccctcttccagtggaaagcccaaccatgcagacatcttgctcataaacttacagtatgtttcagaagtggaaataattaatgaccgaacagaaacccctcctcccctagcttcactcaatgttagtaagcttgccagcaaagcacggacagagaaggaggagaagctgagccaggcctatgcaatcagtgctggtgtctctctagagggccagcagctcttccagaccattcacaagaccattaaagactgtaaatggcaagaaaaaaacatcgtagtcatggaagaagttgttattacacccccatatcaagtggaaaactgtaaaggcaaagaggggagtgcactgagccatgtacgcaaaatagttgaaaaacattttagagacgtggaaagccaaaagatactgcaacgttcacaagcccagcaaccacagaaggaggccgccctgtcatcctgagtccgtacacatggaggactcttccagcatccagccaaggaggcgctggtggtggcttcagcggaggcaggccgggggagggaagggatcctatatgtcctgttggctcttaacaaagggtcagcatttccaaatcttagacttgaacaaacaaaacacccaacaaaaaagaacaagagaataatttaaaagttgaatcattacttgactaacagacttcggtccaccatgtccttttcacagccctcttctggaacagtcaccttgttaattttatttttgaaaattattttcccactctgccctttacttctgactttcctttcctagtttgttcccgccattctgtttttataagtggctacacttgccttctgaatgattgaaagaaacttttacatcttttcttccaaaataaaagtaacaagctgactgtgattcttaaattgagaccagagcagcaaacgtctcactttaaatttttgttttcttttcctttttttttcttttttcttttttttttttttttttgcacagggcatggcttgaattagttttatttttcttaactttaaatatatatatgaaaatatatattaaaatgttctctaaatattttctgcttcttgcaggtctctttttactagatcatggctgttcttcccacctcatccctctgaaaataaaaatgtattgccctccccaccatccatcatagccaggccactaacttgacttggtgcaagagattcttgctgcgaactttgtagagccagtgtgcagatagaatttggctttgagggttcctgatggctttttagtctttaactgtgtgtgtaccagtctcacatttggcccaaacctcaggattctccctctgcctgtcttacttcatggtactagaagaccttcctcgccactctctccacatgagagagtcagctgccctttctcctgtgcctctgcaggaagaactctcttgcatggcacatctcagctcctcattgagggatagttttctttgataagaaacctggagtccatttactctgacctctctttaaatctatatccagagccactagcccaggaaaaacttgggtgacccgtaatttctcttctcctgctgtccttttgctcttacgccccaccccaactccccttaaattttacaggcttatgacagtttgtatgtgctcagccaatgagcagaaaacctggaaagaatttctggactttagcccaccagtttgtctggttgactaacctgctgagagctaaaattggcacccattgccccgtgccttcaggcagtctcctggggcagagtatgccaccatccgaatatcaggcactgagtgggatgtgggtgatgctcacatgactggctagagctttgggggtggggtgggggttaactactatttttttggccatgatctctttccccttcctttttttttttaattaaataaatggatcaaattaaataattcaagccctgccttcaaaatgaaatttttttttagtattatttagcaaaaacaataaaacccaaatttttttaaccatc

SEQ ID NO: 1164 - DNA, 1971 bp, human
gtggctcacgcctgtaatcccagcactttgggaggccgagacgggtggatcacctgaggtcaggagttcgagaccagcctgaccaacgtggtgaaaccctgtctctactaaatacaaaatattagccggacgtgggggcgcgtgcctgtaatcccagctacttgggaggctgaggcaggagaatcgcttgaacccgggaggcggaggttgcagtgagccgagattccgccagtgcactccagcctggacaacaagagctaaaactctgtctcagaaaaaaaaaaaaaaagtacctggaaaaagtcgcagacagcgagcttttcgccagtgccaggaatacagataaaacgagagagactaagggagggagcgcgagcactagcgcgcgagagagagagcgagagcgcgcgcgccgatgacgtcacgctcggcgtctcggccatcttagctgtagatagaggcggcaacctcggaagtgcggagcgggtgggcctatatagatgttgaggtgcggaggccgtgggcttttgttgggcctggctgtagccgcagcagcggtaatggcagcacggcttatgggctggtggggtccccgcgctggctttcgccttttcataccggaggagctgtctcgctaccgcggcggcccaggggacccgggcctgtacttggcgttgctcggccgtgtctacgatgtgtcctccggccggaggcactacgagcctgggtcccactatagcggcttcgcaggccgagacgcatccagagctttcgtgaccggggactgttctgaagcaggcctcgtggatgacgtatccgacctgtcagccgctgagatgctgacacttcacaattggctttcattctatgagaagaattatgtgtgtgttgggagggtgacaggacggttctacggagaggatgggctgcccaccccggcactgacccaggtagaagctgcgatcaccagaggcttggaggccaacaaactacagctgcaagagaagcagacattcccgccgtgcaacgcggagtggagctcagccaggggcagccggctctggtgctcccagaagagtggaggtgtgagcagagactggattggcgtccccaggaagctgtataagccaggtgctaaggagccccgctgcgtgtgtgtgagaaccaccggcccccctagtggccagatgccggacaaccctccacacagaaatcgtggggacctggaccacccaaacttggcagagtacacaggctgcccaccgctagccatcacatgctcctttccactctaagccgtagcctcttctgttaataacacacagagagctctgccaagcacctgagtaggcccttgacacttgtgtgccctgggatgcctcctggcgcgaatcaggaggttctggaaggactctggctatattctgcaaatgtggctcatgccccttaccgtggctcggcgttgtggtgcctgagggacagccggccacctgcccagtactggtcagcttttcaacactattccctttgacctactggccatcttcctcacagccctcagatatcaacgggcacaaataagaccaactcaatttccacttgaatttacaaccaaaagcctgctgagttgattacagctgggccaatacagtacgaggcaataacaaattagtgtgggttgattctggaattggaaaagcttttgcttgtatggatacagcaaatccagatgtctctgaacaaagcaacaatttaaagcaacgacattttctgtcctttaagcacttaaaatcaggtgtggtgtgttttcaaaggcagaagtctgcattttgagcaaaaggtggcttcccagctctaacaaggtaactggttagcatgacattaaagcttgggcaaggcttcaaacttaaaaaaaaaaaaaaaaaaaaaaaaaaaaaaaaaaaaaaaaaaaaaaaaaaaaaaaaaaaaaaa

SEQ ID NO: 1165 - DNA, 1212 bp, human
cgggtgggtggccgaacttctcccgccatggagggagcagcggcccgggaggcccgggggaccgagaccccgcgcgcgtctgcgcccccgcccgcgccctcggagcccccggccgcgccccgcgcccgcccgcgcctcgtcttccgcacgcagctggcgcacgggagccccacgggcaagatcgagggcttcaccaacgtccgcgagctgtacgccaagatcgccgaagccttcgggatcgcgcccaccgagattttattctgcaccctcaacagccacaaagtggacatgcagaagctcctggggggtcagataggcctggaggacttcatctttgcccacgtgcgaggcgagaccaaggaggtggaggtcactaagacagaggatgctctggggctgaccatcacggacaacggggctggctacgccttcatcaagagaatcaaggaaggcagtatcatcaaccggatcgaggcagtgtgcgtgggtgacagcatcgaagccatcaacgaccactccattgtgggctgccgccactacgaggtggccaagatgctccgggagctgcccaagtcccagcccttcaccctgcgcctggtgcagcccaagagggccttcgatatgattggccagagaagtcggtccagcaaatgtccagtagaggcgaaagtgaccagcgggagggagaccctgcggcttcgttctgggggggctgccacagtggaggaagcgcccagtgagtttgaggaggaggcatctcggaaggttgatgacctgctggaaagctacatgggcattcgggaccccgagctggcgtccaccatggtggagacgtccaagaagacagcgagcgcccaggagtttgcacgctgtttagactccgtcttgggcgagttcgccttccccgacgagtttgtggtggaagtgtgggccgccatcggcgaggccagagaggcctgtggctagtttgccctgggggggcccagcacagccccagcccggagcccagccccctgccccggccctgctccagaacccagcccagatcggaggacaagttcctctctagaacccaatccaatttggagccccagcccaactccagaacccagcccttctctagaatccagcccagatctgaggccaagctatgtgctagagcccaggccagctctgagaccaagcccagcattgagaataagctctgttcta

SEQ ID NO: 1166 - DNA, 819 bp, human
acctaggactccctgagctgggactagcgaaatctgtctgcactgatcgcagtcgtcctcagtttcaccctctaggaatcggcctggggatgcacgtgctactctcttcctccaggccggtccccggcgcgtgcgcgcgatccatgtccatgtccgcgcctatcaataaagttgctcacttgttgccggcccgctagcccgaaaggttgcgcgcgcagaccgagaagtctcgcgatagccagccgcggctgcccttgcgcttcccgagctggcggggtccgtggtgcgggatcgagattgcgggctatggcgccgaaggtttttcgtcagtactgggatatccccgatggcaccgattgccaccgcaaagcctacagcaccaccagtattgccagcgtcgctggcctgaccgccgctgcctacagagtcacactcaatcctccgggcaccttccttgaaggagtggctaaggttggacaatacacgttcactgcagctgctgtcggggccgtgtttggcctcaccacctgcatcagcgcccatgtccgcgagaagcccgacgaccccctgaactacttcctcggtggctgcgccggaggcctgactctgggagcacgcacgcacaactacgggattggcgccgccgcctgcgtgtactttggcatagcggcctccctggtcaagatgggccggctggagggctgggaggtgtttgcaaaacccaaggtgtgagccctgtgcctgccgggacctccagcctgcagaatgcgtccagaaataaattctgtgtctgtgtgtgaaaaaaaaaaaaaaaaaaaa

SEQ ID NO: 1167 - DNA, 1685 bp, human
gccgggcccagctgcggggcggaggcggaggcggaggagaggcctgcggcggcagggagcggcgggactgggagcgggcgccggagccgacccgagccgagccgagccgagccgagccggagcgggcggcgaaggccggcgcggcgagcagcaaccatgtcggtgttcgggaagctgttcggggctggagggggtaaggccggcaagggcggcccgaccccccaggaggccatccagcggctgcgggacacggaagagatgttaagcaagaaacaggagttcctggagaagaaaatcgagcaggagctgacggccgccaagaagcacggcaccaaaaacaagcgcgcggccctccaggcactgaagcgtaagaagaggtatgagaagcagctggcgcagatcgacggcacattatcaaccatcgagttccagcgggaggccctggagaatgccaacaccaacaccgaggtgctcaagaacatgggctatgccgccaaggccatgaaggcggcccatgacaacatggacatcgataaagttgatgagttaatgcaggacattgctgaccagcaagaacttgcagaggagatttcaacagcaatttcgaaacctgtagggtttggagaagagtttgacgaggatgagctcatggcggaattagaagaactagaacaggaggaactagacaagaatttgctggaaatcagtggacccgaaacagtccctctaccaaatgttccctctatagccctaccatcaaaacccgccaagaagaaagaagaggaggacgacgacatgaaggaattggagaactgggctggatccatgtaatggggtccagcgctggctgggcccagacagactgtggtggcctgcgcagcgagcaggcgtgtgcgtgtgtggggcaggcaggatgtggtgcaggcaggttccatcgctttcgactctcactccaaagcagtagggccgcgttgctgctcactctctgcatagcatggtctgcacctgggagatgggcggggggaggggggcgggcggggtgggaagtgcctgctgtttataatgttgaatttctgtaaaataaactgtatttgcaaatccaacattgagcttctggactacgctgactccactgctgaatcctcaatggaaagggtcgactggttgcagttgaaatgacctgaaatgtagcctctgtccttgtaagtcagttgacttgccgcacatctctttgtgtacttgtacggtactggcagaaaagtcatttttcaaaagccataggcttttccttgcccttagctgtaataatgcatctgattttgatttcctccagagctgtgtttctgtccatcacctgtgtattggccctgtgtttaccactctggcccactcctcacccccttgctcccctggtcttctggagtttgtgacattgatttgaaatggatggtgttctcttgagagcaagtgagattgttagaattaagttccaactatacagttttctaacatagctataaggtccttgttgctgtttgtgataactgatagataactcattggaaacgtgcatacatttatattcagatgaaattatggtttgcactgtctattaaatatctcgattaattttcaaaaaaaaaaaaaaaaaaaaaaaaaaaaaaaaaaaaaaaaaaaaaaaaaaa

SEQ ID NO: 1168 - DNA, 2099 bp, human
gtccgttggtcggtcgggaacgaggctcaggcggccaggcccgcgcggagccgttgccatggcagccgccgccggggacgcggacgacgagccgcgctcaggccactcgagctcggagggcgagtgcgcggtggcgccggagccgctgactgacgctgagggcctcttctccttcgctgacttcgggtctgcgctgggcggcggcggcgcgggcctctcgggccgggcgtccggcggggcccagtcgccgctgcgctacttgcacgtcctgtggcagcaggatgcggagccgcgcgacgagctgcgctgcaagatacccgctggccggctgaggcgcgctgccaggccccaccggcggctcgggcccacgggcaaggaggtgcacgctctgaagagactgagggactcggccaatgccaatgatgtggaaacagtgcagcagctgctggaagatggcgcggatccctgtgcagctgatgacaagggccgcacagctctacactttgcctcatgcaatggcaatgaccagattgtgcagctgctcctggaccatggtgctgatcctaaccagcgagatgggctggggaacacgccactgcacctggcggcctgcaccaaccacgttcctgtcatcaccacactgctacgaggaggggcccgtgtagatgccctggaccgagctggtcgcacacccctgcacctggccaagtcaaagctgaatatcctgcaggagggccatgcccagtgcctagaggctgtgcgtctggaggtgaagcagatcatccatatgctgagggagtatctggagcgcctagggcaacatgagcagcgagaacgcctggatgacctctgcacccgcctgcagatgaccagtaccaaagagcaggtggatgaagtgactgacctcctggccagcttcacctccctcagtctgcagatgcagagcatggagaagaggtagcaagagaggctccctgccttcctgccactgccccaccctgccccactgctgtctcagtaccaagaaaaagcccaacatctgggacttggagctgcacttgtctggtgaggaccttgccctcacccgcacatgccgtggggcagagatgctctctctccacggcctcagagccactcccagccacagtttccagcatctctgtggacagggaccacagctcccagcttcttccagttctcgcagcaccagaccagcctctgcagctgcacttcagctccgcagacctgcgctatctcagcagacctcacttgccccatggccttcatggcgcgctccaggcctcagacccttctctgtgttccgtcctggccatgggcttgttgcagtcagcaggtgtgggcttaggcgggcaccctgtggccaggggtactgcgtgaggccctcagttggtcctgtgcctctcaccagcacttagacagacacgtcaccagactttcaaggagatactgcagtgagtttctctggttggaaggggagggttggtgagtcccagaccttaaaaatacaaggttaagagggaccccaaagcaaaaaattccaacccttttcctcccagtcattgaaacaccaaaactattataccggagggtgtaatagttttgctgcccagttgtggtaggccagtagtggcctcccaagatgcccatgtcctaatcccaggaacctgtcaaaattaccttgtatggccaaaggggctttgcagatgtaatgaagttaaggatctttcgccaggaagattatcccagcttgttcaggagggcttgatgtcctcacccgggtctgtataacagaagagcaggtgacgggagaggaggttggaggtgtagcgatggagcaggaaactggagttgaggagggcagctcaagccacagagtccaggccacctcagagccaggaaatgcatcctcccacagagccctggaaggccccagccctgctcccacctggactggctcagtgaggctaattttataattctggctgattttagaactctaagggaataaatttgtgttgttttaagtcaaaaaaaaaaaaaaaaaaaaaaaaaaaaaaaaaaaaaaaaaaaaaaaaaaa

SEQ ID NO: 1169 - DNA, 2004 bp, human
cggactcctctttctcccggaagcggagcaccgagccggcaaaggcttgggtgtgagacagcagcggtggcagacaccgcagaagcaaagagcagtgaggctcctgcattcgggtggagcaccatggacgaagctggcagctctgcgagcggcgggggcttccgcccgggcgtggacagcctggacgaaccgcccaacagccgcatcttccttgtgatcagcaagtacacacctgagtcggtgctgagggagcgcttctcgccttttggcgacatccaggacatctgggtggtgcgggacaagcacaccaaggagtccaagggcattgctttcgtcaagttcgcccgcagctcacaggcctgcagggccatggaggagatgcatggccagtgcctcggccccaacgacaccaagcccatcaaggttttcattgctcagtcccgatcatctggaagtcaccgagatgttgaagatgaagaacttacaagaatctttgttatgataccaaagtcctacacagaagaagatctgcgggaaaaatttaaggtgtatggagatatcgagtattgcagcattattaagaataaagtgactggagaaagtaaaggtttgggctacgtacgatacttaaaaccatcacaagctgcccaagcaatagaaaactgtgatcgaagttttagagcaatcttggctgaacctaaaaataaagcatctgaatcctctgaacaagattattatagtaatatgaggcaagaagctttgggacatgaacctagagtaaatatgtttccatttgaacaacaatctgaattttcaagttttgacaagaatgatagccgaggccaggaagcaatctccaaacgcttgtcagttgtatcaagagttcctttcactgaagaacagcttttcagcatttttgatatagtaccaggattggaatattgtgaagttcaacgagatccttattcaaattatggtcatggagtggttcagtattttaatgtagcatcagctatttatgcaaaatacaaattacatggatttcagtaccctcctgggaaccgaataggtgtttccttcattgatgatggaagtaatgcaacagagtaagtaccattccaggagtgtctaaagccgagctttgagtgtacatgattgataggacttgaagaataaaaatagaaacaattgacctctcaggtgagaaagtcacacaaaacaagctactgttaaaagactgaatatttttagttttctgtaaattatcagttattttttccagtctccttagaaaaatggcaacacagatggtagctgcacagcttgcatcaatggtgtggaataacccaagtcagcaacaatttatgcaatttggaggaagctctggatcacagttgcctcaaatccagacagatgttgtacttccatcatgcaaaaaaaaagctcctgctgaaactcctgtgaaagaaagactttttattgtgtttaatcctcatcctttacctttagacgtattagaagatatattctgtcgttttggtaacctgatcgaagtttaccttgtgtcaggaaaaaatgtggggtatgccaagtatgccgatagaataagtgctaatgatgccattgccactctacatggaaagattctgaatggggtgagacttaaagttatgctggcagattcgccaagagaagaatctaacaaacggcaaagaacttactgattcttgagaacaaagactaaataatgacataatcctcagctgactgactgaaaatgtgactggacgcattccctgtggacagttgacagctttttttttttccatatacctgatagtctgtgtacagcattgttttgtctgggaagcagggattgctgacatgtatttttgaatccatacattaatgctaaaacgaatatagtagttgttccttagagcaatatgttgttacgtgtagcagaaataaagttttctttgcttaactaaaaaaaaaaaaaaa

SEQ ID NO: 1170 - DNA, 1932 bp, human
cctctagcttagcgagcgctggagtttgaagagcgggcagtggctgcacacgccaaactttccctatggcttcggtgaccagggccgtgtttggagagctgccctcgggaggagggacagtggagaagttccagctgcagtcagacctcttgagagtggacatcatctcctggggctgcacgatcacagccctagaggtcaaagacaggcaggggagagcctcggacgtggtgcttggcttcgccgagttggaaggatacctccaaaagcagccatactttggagcagttattgggagggtggccaaccgaatcgccaaaggaaccttcaaggtggatgggaaggagtatcacctggccattaacaaggaacccaacagtctgcatggaggagtcagagggtttgataaagtgctctggacccctcgggtgctgtcaaatggcgtccagttctcgcgcatcagtccagatggtgaagaaggctaccccggagagttaaaagtctgggtgacatacaccctggatggcggagagctcatagtcaactacagagcacaagccagtcaggccacaccagtcaacctgaccaaccattcttacttcaacctggcaggccaggcttccccaaatataaatgaccatgaagtcaccatagaagcggatacttatttgcctgtggatgaaaccctgattcctacaggagaagttgccccagtgcaaggcactgcattcgacctgagaaagccagtggagcttggaaaacacctgcaggacttccatctcaatggttttgaccacaatttctgtctgaagggatctaaagaaaagcatttttgtgcaagggtgcatcatgctgcaagcgggcgggtactagaagtatacaccacccagcccggggtccagttttacacgggcaacttcctggatggcacattaaagggcaagaatggagctgtctatcccaagcactccggtttctgcctggagactcagaactggcctgatgcagtcaatcagccccgcttccctcctgtgctgctgaggcctggtgaggagtatgaccacaccacctggttcaagttttctgtggcttaaggaagtgtgaagatatgatccagtccagggctaggctcagccacctgtctcctgtccagaaaaaaggtgaagattaagaagctttcagaatgattctatggattaaaatcatacaaatggtggctgttctgagaatcagtctgggtattgatttccttttccagtgactggctccaggccatgtctaatgaccagctcgattccctgtgcagttcagagagcaagtgaacccaaccaacaatgtcgtcatctaagccctgaccctagccagggactcccatgctgctgttggctccatctctccacactgcctctttcttttcaactttttgcccttcctttctttaaagctattctcacattgcttttatttcctcctccttcacctccaaccactgtcagcagcactctggagttttcaaatgtcacattagcctcaccctgcatgctaggagatggacctgtctctatacagcagtagatgattgataagtgaggaaactgaggcttacagaggttgaagaccaacaagctaataaataaaaagttgaggccgggcacggtggctcacgcctgtaatcccagcactttggaaggccgaggcaggcggatcacgaggtcaggagatcgagaccatcctggctaacacggtgaaaccccgtctctacataaaaaattagctgggtgtggtagcacgcacccgtagttccagctacttgggaggctgaagcaggagaatcgcttgaacctgggaggtggaggttgcagtgagccgagatcatgccactgcactgggcaacagagcaaaactcgatctcaaaaaaaaaaaaaaaaaaaa

SEQ ID NO: 1171 - DNA, 1319 bp, human
cgccgggggccggctggcgcgggggctccggtaacccgggctgggcgggggagaggaaggggcggggcagggagcccgccagagtgcggggtcgcggtgcggacttcgagcacgagccctaaagacgctcagcactcgtcgcttctcctagcagaccctgcccggcttggcgatggagtttccggacctcggcgctcactgttcggagccgagctgtcagcgcttggattttctgccgcttaagtgtgatgcctgctcaggcatcttctgcgcagaccatgtggcctacgcccagcatcactgtggatctgcttaccaaaaggatatccaggtacctgtgtgccctctctgtaatgtgcctgtgcctgtggccagaggggagccccctgaccgtgctgtgggagagcacattgacagagactgtcgctctgatccagcacagcaaaaacgtaagatcttcaccaataagtgtgaacgcgctggctgccggcagcgagaaatgatgaaactgacctgtgaacgctgtagccgaaacttctgcatcaagcaccggcatccactggaccatgattgctctggggaggggcacccaaccagccgggcaggacttgctgccatctccagagcacaagctgtggcttctacaagcactgtccccagcccaagtcaaaccatgccttcctgtacctctcccagcagagccacaacccgatctccgtcctggacagcccctccagtgattgctttgcagaatggcctgagtgaggatgaagctctgcagcgggccctggaaatgtccctggcagaaaccaaaccccaggttccaagttgtcaggaggaagaagacctagctttagcacaagcactgtcagccagtgaggcagaataccagcggcagcaggcccagagccgcagctcgaagccgtccaactgcagcctgtgctagggccctgggcttggggagggaggttcacctgaggaggactgtggccctcacacctctagggtacacagggagaggaggcccggagcaccctggagggcagagacaagcgggagtgatgtggaggtcgccctgggagcctctggaaggccttgctagtgctccagctgcatggaagagagcggctagcaactgttccctggttgggccctcagtggatgctggccaggccctactcttagccccttcatcatgtcatctcccttatgctggagctgccccgatgtggagtgggcaggaaggggcctggaaaaaataaaggatcttggcagttgataaaacgtaaaaaaaaaaaaggaaaaaaaaaaaaaaaaaa

SEQ ID NO: 1172 - DNA, 1619 bp, human
agatctatctggaggagtttctgtggagccagccaccctcaccaggtgccttccattagagtttaatgctttgctgcggtttcctgaaagagccccacagagagtgggtctcgatgggtcctgaaccgcaccacaaccggccagtgagacctcctgctcacatccgtaaagcccactgattcttttactacactttttatgagaacaagacattttctaggaagatggtggcagaaaaagagaccctgagcttaaacaaatgcccagacaagatgccgaagaggaccaagctgctggcacaacagccgctcccggtgcaccagcctcactctctggtttctgagggtttcacagtcaaagccatgatgaaaaactcagtcgtgagaggccctccagctgcaggggcatttaaagaaagaccaaccaagcccacagcatttcgaaaattctatgagcgaggtgacttcccaattgcccttgagcatgattcgaaaggaaacagaatcgcctggaaggtagaaattgagaagctggattaccatcattatctgcctctgttttttgatgggctttgtgaaatgacatttccctatgagttttttgctcggcaaggaatccacgacatgctggaacacggtgggaacaagatcctacctgtccttccacagctcattatcccgataaaaaatgccttgaacctccgaaaccgacaggtcatctgtgtcactctcaaggtcctccagcatctggttgtgtcagctgagatggtgggcaaggccttggtgccttattaccgtcaaatcctccctgtcctgaacatctttaagaatatgaatgggtcttactctttgcccaggctggagtgcagtggcgcgatcatggctcgttgcaacctcgaccacctgggctcaagtgatcctcccacctcagcctctcaagtagctgagattatagtgaactccggagacggcattgactacagccagcagaagagggagaacattggggacttgatccaggagacactggaggccttcgagcgctacggaggagaaaatgcctttatcaacattaagtacgtggtcccaacctacgagtcttgcttgctaaactaacagtggcagcagctgggacttgaaacctcccgttggtgttgggatcatctgtctctgttgcttttagcatctcattccttgtgacttccacagctttcttttctacagctgctaaaatagtggcttatgggccattggactgttagccctattgagagcaaggctttccaatacataaatagtgcctgtttcttagattacaatagtgtactgtgcttatttgttctaagagaagaattgcttctttatacagctccgacagaagcaggagtccgagttaaaccttcagttgtatagacaataaactataattttcatatgcaattcagcaattgctgttctgtgtgtgcctgccctgggggtgatgtcagaggttgtaagggaagagtttatgctgactgcttactaggtgtttgtcatggaagagaagcatgggttcagcagtgcctctctagcagctgtgcggaataatgtgctttgacgttcaataaaactgttgaatct

SEQ ID NO: 1173 - DNA, 5883 bp, human
ctaaactcgaattaagagggaaaaaaaatcagggaggaggtggcaagccacaccccacggtgcccgcgaacttccccggcagcggactgtagcccaggcagacgccgtcgagatgcagggcccaccgctcctgaccgccgcccacctcctctgcgtgtgcaccgccgcgctggccgtggctcccgggcctcggtttctggtgacagccccagggatcatcaggcccggaggaaatgtgactattggggtggagcttctggaacactgcccttcacaggtgactgtgaaggcggagctgctcaagacagcatcaaacctcactgtctctgtcctggaagcagaaggagtctttgaaaaaggctcttttaagacacttactcttccatcactacctctgaacagtgcagatgagatttatgagctacgtgtaaccggacgtacccaggatgagattttattctctaatagtacccgcttatcatttgagaccaagagaatatctgtcttcattcaaacagacaaggccttatacaagccaaagcaagaagtgaagtttcgcattgttacactcttctcagattttaagccttacaaaacctctttaaacattctcattaaggaccccaaatcaaatttgatccaacagtggttgtcacaacaaagtgatcttggagtcatttccaaaacttttcagctatcttcccatccaatacttggtgactggtctattcaagttcaagtgaatgaccagacatattatcaatcatttcaggtttcagaatatgtattaccaaaatttgaagtgactttgcagacaccattatattgttctatgaattctaagcatttaaatggtaccatcacggcaaagtatacatatgggaagccagtgaaaggagacgtaacgcttacatttttacctttatccttttggggaaagaagaaaaatattacaaaaacatttaagataaatggatctgcaaacttctcttttaatgatgaagagatgaaaaatgtaatggattcttcaaatggactttctgaatacctggatctatcttcccctggaccagtagaaattttaaccacagtgacagaatcagttacaggtatttcaagaaatgtaagcactaatgtgttcttcaagcaacatgattacatcattgagttttttgattatactactgtcttgaagccatctctcaacttcacagccactgtgaaggtaactcgtgctgatggcaaccaactgactcttgaagaaagaagaaataatgtagtcataacagtgacacagagaaactatactgagtactggagcggatctaacagtggaaatcagaaaatggaagctgttcagaaaataaattatactgtcccccaaagtggaacttttaagattgaattcccaatcctggaggattccagtgagctacagttgaaggcctatttccttggtagtaaaagtagcatggcagttcatagtctgtttaagtctcctagtaagacatacatccaactaaaaacaagagatgaaaatataaaggtgggatcgccttttgagttggtggttagtggcaacaaacgattgaaggagttaagctatatggtagtatccaggggacagttggtggctgtaggaaaacaaaattcaacaatgttctctttaacaccagaaaattcttggactccaaaagcctgtgtaattgtgtattatattgaagatgatggggaaattataagtgatgttctaaaaattcctgttcagcttgtttttaaaaataagataaagctatattggagtaaagtgaaagctgaaccatctgagaaagtctctcttaggatctctgtgacacagcctgactccatagttgggattgtagctgttgacaaaagtgtgaatctgatgaatgcctctaatgatattacaatggaaaatgtggtccatgagttggaactttataacacaggatattatttaggcatgttcatgaattcttttgcagtctttcaggaatgtggactctgggtattgacagatgcaaacctcacgaaggattatattgatggtgtttatgacaatgcagaatatgctgagaggtttatggaggaaaatgaaggacatattgtagatattcatgacttttctttgggtagcagtccacatgtccgaaagcattttccagagacttggatttggctagacaccaacatgggttacaggatttaccaagaatttgaagtaactgtacctgattctatcacttcttgggtggctactggttttgtgatctctgaggacctgggtcttggactaacaactactccagtggagctccaagccttccaaccatttttcatttttttgaatcttccctactctgttatcagaggtgaagaatttgctttggaaataactatattcaattatttgaaagatgccactgaggttaaggtaatcattgagaaaagtgacaaatttgatattctaatgacttcaaatgaaataaatgccacaggccaccagcagacccttctggttcccagtgaggatggggcaactgttctttttcccatcaggccaacacatctgggagaaattcctatcacagtcacagctctttcacccactgcttctgatgctgtcacccagatgattttagtaaaggctgaaggaatagaaaaatcatattcacaatccatcttattagacttgactgacaataggctacagagtaccctgaaaactttgagtttctcatttcctcctaatacagtgactggcagtgaaagagttcagatcactgcaattggagatgttcttggtccttccatcaatggcttagcctcattgattcggatgccttatggctgtggtgaacagaacatgataaattttgctccaaatatttacattttggattatctgactaaaaagaaacaactgacagataatttgaaagaaaaagctctttcatttatgaggcaaggttaccagagagaacttctctatcagagggaagatggctctttcagtgcttttgggaattatgacccttctgggagcacttggttgtcagcttttgttttaagatgtttccttgaagccgatccttacatagatattgatcagaatgtgttacacagaacatacacttggcttaaaggacatcagaaatccaacggtgaattttgggatccaggaagagtgattcatagtgagcttcaaggtggcaataaaagtccagtaacacttacagcctatattgtaacttctctcctgggatatagaaagtatcagcctaacattgatgtgcaagagtctatccattttttggagtctgaattcagtagaggaatttcagacaattatactctagcccttataacttatgcattgtcatcagtggggagtcctaaagcgaaggaagctttgaatatgctgacttggagagcagaacaagaaggtggcatgcaattctgggtgtcatcagagtccaaactttctgactcctggcagccacgctccctggatattgaagttgcagcctatgcactgctctcacacttcttacaatttcagacttctgagggaatcccaattatgaggtggctaagcaggcaaagaaatagcttgggtggttttgcatctactcaggataccactgtggctttaaaggctctgtctgaatttgcagccctaatgaatacagaaaggacaaatatccaagtgaccgtgacggggcctagctcaccaagtcctgtaaagtttctgattgacacacacaaccgcttactccttcagacagcagagcttgctgtggtacagccaatggcagttaatatttccgcaaatggttttggatttgctatttgtcagctcaatgttgtatataatgtgaaggcttctgggtcttctagaagacgaagatctatccaaaatcaagaagcctttgatttagatgttgctgtaaaagaaaataaagatgatctcaatcatgtggatttgaatgtgtgtacaagcttttcgggcccgggtaggagtggcatggctcttatggaagttaacctattaagtggctttatggtgccttcagaagcaatttctctgagcgagacagtgaagaaagtggaatatgatcatggaaaactcaacctctatttagattctgtaaatgaaacccagttttgtgttaatattcctgctgtgagaaactttaaagtttcaaatacccaagatgcttcagtgtccatagtggattactatgagccaaggagacaggcggtgagaagttacaactctgaagtgaagctgtcctcctgtgacctttgcagtgatgtccagggctgccgtccttgtgaggatggagcttcaggctcccatcatcactcttcagtcatttttattttctgtttcaagcttctgtactttatggaactttggctgtgatttatttttaaaggactctgtgtaacactaacatttccagtagtcacatgtgattgttttgttttcgtagaagaatactgcttctattttgaaaaaagagttttttttctttctatggggttgcagggatggtgtacaacaggtcctagcatgtatagctgcatagatttcttcacctgatctttgtgtggaagatcagaatgaatgcagttgtgtgtctatattttcccctcacaaaatcttttagaatttttttggaggtgtttgttttctccagaataaaggtattactttagaaataggtattctcctcattttgtgaaagaaatgaacctagattcttaagcattattacacatccatgtttgcttaaagatggatttccctgggaatgggagaaaacagccagcaggaggagcttcatctgttcccttcccacctccaacctagccctactgcccaccccaccccaacccaccccatgcccagtggtctcagtagatacttcttaactggaaattctttcttttcagaatctaggtggtgaattttttttaagtggcacggtctttttctgcttgaaatctgatcacaccccccagccattgccctccctctctttttcctctgtagagaaatgtgaggggcagtacatttactgtgcttttcacaccatctcagaggttgaggagcatactgaaaattgccctggggggtgctgggtgtgctgtctccttcccacatcctcagccccacaccagctctatttcaggggtgagagtcagagagcactgcaatatgtgcttcatgggatttcgattcgaagatcctagaccagggagacactgtgagccagggatacaacaaaatactaggtaagtcactgcagaccgacctccctgcagtttgggaaagaagctgggtttgtggagaatcagagcatcttgacatgactgctgacctaaagatccctggcattggccagggatcctgtggaacctcttctagttcaggggtgtgagcattagactgccagttgtctagtgacatctgatgcttgctgtgaacttttaagatccccgaatcctgagcacctcaatctttaattgccctgtattccgaagggtaatataatttatctggatggaaattttaaagatgaatcccccttttttcttttcttctctcttttctttccttctccctttcttctttgccttctaaatatactgaaatgatttagatatgtgtcaacaattaatgatcttttattcaatctaagaaatggtttagtttttctctttagctctatggcatttcactcaagtggacaggggaaaaagtaattgccatgggctccaaagaatttgctttatgtttttagctatttaaaaataaatccatcaaaaataaagtatgcaaatgtatctttt

SEQ ID NO: 1174 - DNA, 3493 bp, human
acgcggtgcacgaggcagagcccacaagccaaagacggagtgggccgagcattccggccacgccttccgcggccaagtcattatggcagccactgagatctctgtcctttctgagcaattcaccaagatcaaagaactcgagttgatgccggaaaaaggcctgaaggaggaggaaaaagacggagtgtgcagagagaaagaccatcggagccctagtgagttggaggccgagcgtacctctggggccttccaggacagcgtcctggaggaagaagtggagctggtgctggccccctcggaggagagcgagaagtacatcctgaccctgcagacggtgcacttcacttctgaagctgtggagttgcaggatatgagcttgctgagcatacagcagcaagaaggggtgcaggtggtggtgcaacagcctggccctgggttgctgtggcttgaggaagggccccggcagagcctgcagcagtgtgtggccattagtatccagcaagagctgtactccccgcaagagatggaggtgttgcagttccacgctctagaggagaatgtgatggtggccagtgaagacagtaagttagcggtgagcctggctgaaactactggactgatcaagctcgaggaagagcaggagaagaaccagttattggctgaaagaacaaaggagcagctcttttttgtggaaacaatgtcaggagatgaaagaagtgacgaaattgttctcacagtttcaaattcaaatgtggaagaacaagaggatcaacctacagctggtcaagcagatgctgaaaaggccaaatctacaaaaaatcaaagaaagacaaagggagcaaaaggaaccttccactgtgatgtctgcatgttcacctcttctagaatgtcaagttttaatcgtcatatgaaaactcacaccagtgagaagcctcacctgtgtcacctctgcctgaaaaccttccgtacggtcactctgctgcggaaccatgttaacacccacacaggaaccaggccctacaagtgtaacgactgcaacatggcatttgtcaccagtggagaactcgtccgacacaggcgctataaacatactcatgagaaaccctttaaatgttccatgtgcaagtatgccagtgtggaggcaagtaaattgaagcgccatgtccgatcccacactggggagcgcccctttcagtgttgccagtgcagctatgccagcagagatacctacaagctgaaacgccacatgagaacgcactcaggtgagaagccttacgaatgccacatctgccacacccgcttcacccagagcgggaccatgaaaatacatattctgcagaaacacggcgaaaatgtccccaaataccagtgtccccattgtgccaccatcattgcacggaaaagcgacctacgtgtgcatatgcgcaacttgcatgcttacagcgctgcagagctgaaatgccgctactgttctgctgtcttccatgaacgctatgccctcattcagcaccagaaaactcataagaatgagaagaggttcaagtgcaaacactgcagttatgcctgcaagcaggaacgtcatatgaccgctcacattcgtacccacactggagagaaaccattcacctgcctttcttgcaataaatgtttccgacagaagcaacttctaaacgctcacttcaggaaataccacgatgcaaatttcatcccgactgtttacaaatgctccaagtgtggcaaaggcttttcccgctggattaacctgcacagacattcggagaagtgtggatcaggggaagcaaagtcggctgcttcaggaaagggaagaagaacaagaaagaggaagcagaccatcctgaaggaagccacaaagggtcagaaggaagctgcgaagggatggaaggaagccgcgaacggagacgaagctgctgctgaggaggcttccaccacgaagggagaacagttcccaggagagatgtttcctgtcgcctgcagagaaaccacagccagagtcaaagaggaagtggatgaaggcgtgacctgtgaaatgctcctcaacacgatggataagtgagagggattcgggttgcgtgttcactgcccccaattcctaaagcaagttagaagtttttagcatttaaggtgtgaaatgctcctcaacacgatggataagtgagagagagtcaggttgcatgttcactgcccctaattcctaaagcaagttagaaatttttagcattttctttgaaacaattaagttcatgacaatggatgacacaagtttgaggtagtgtctagaattgttctcctgtttgtagctggatatttcaaagaaacattgcaggtattttataaaagttttaaaccttgaatgagagggtaacacctcaaacctatggattcattcacttgatattggcaaggtggcccacaatgagtgagtagtgatttttggatatttcaaaatagtctagaccagctagtgcttccacagtcaaagctggacatttttatgttgcattatatacacccatgatatttctaataatatatggttttaaacattaaagacaaatgtttttatacaaatgaattttctacaaaatttaaagctaccataatgcttttaattagttctaaattcaaccaaaaaatgttttactcttataaaaaggaaaactgagtaggaaatgaaatactagattagactagaaaataaggaataaatcgattttactttggtataggagcaaggttcacctttagatttttgtattctcttttaattatgctccttggcaggtatgaaattgccctggttacattccattattgcttattagtatttcactccataacccttttttctgctaaaactactctttttatatttgtaaaataattggcagagtgagaagaaacataaaatcagataaggcaaatgtgtacctgtaaggaatttgtactttttcataatgcccagtgattagtgagtatttcccttttgccagttgacaagatttttccaccctcgagcagcgtgagagatgcctctttaacacttgaaattcatttctatctggatacagaggcagatttttcttcattgcttagttgagcagtttgttttgctgccaacctgtctccacccctgtatttcaagatcattgataagccctaaattcaaattcttaagatatggaccttttattgaaaatatcacaagttcagaatccctatacaatgtgaatatgtggaaataatttcccagcaggaagagcattatattctctttgtaccagcaaattaatttaactcaactcacatgagatttaaattctgtgggctgtagtatgccatcattgtgactgaatttgtgcaatggtttcttaatttttttactgttatttaaagatgttttacataattcaataaaatgaaatgacttaaaattgcaaaaaaaaaaaaaaaaaaaaaaaaaaaaaaaaaaaaa

SEQ ID NO: 1175 - DNA, 2352 bp, human
aggctacggttcgcgccagcggccggcgctatggggctgagccgcgtgcgggcggttttctttgacttggacaacactctcatcgacacggccggggcgagcaggagaggcatgttggaggtgataaaactcttacaatcaaaataccattataaagaagaggctgaaatcatctgtgataaagttcaagttaaactcagcaaggaatgttttcatccttacaatacatgcattactgatttaaggacttcacattgggaagaagcaatccaggaaacaaaaggtggtgcagccaatagaaaattggctgaagaatgttatttcctttggaaatctacacgtttacagcatatgacactagcagaagacgtcaaagccatgcttactgaacttcgaaaggaggtccgcctacttctattaacgaatggggacagacagacccagagggagaagattgaggcttgtgcctgtcagtcctattttgacgctgttgttgtaggtggagagcagagagaggagaaaccagcaccgtccatattttattactgctgcaatcttctcggagtacaacctggggactgtgtgatggtcggtgacacattagaaaccgacatccaaggaggcctcaatgcaggattgaaagcaacagtctggatcaataaaaatggaatagtgccactgaagtcctccccagttccgcattacatggtttcttctgtgctagagttacctgctctcttacaaagtatagactgcaaagtcagtatgtccacttaaagcacataaaagggcatgattatgaatgttagaatcaatttgctgagtatgaaataagaaaagttagggcactccacttatgataatccagctctaagaataattttacttatgatttaatggccaatattttgaaggtcttcccaaccctattgcttctaagttgtaacaaccaaccattgagtggtacttatatctgaaaattcagattgcatgaattcaggtcagtagtatagcccagaaaatttaaggaaatatattatttgttagtctgtatctggagctttttaaaattatgttattaatcttttagtatcttggctgcataatgccaagcaggattgctttacacatggatgcacaaatgtaaggtttatcttctggcttaaaaatagatatttttaaaaaatagattttctaaaacacagatttatgaaagcaagtgaatctggttaatatgaaataagtactaagtcacatgcaaatcaaggtattatatagtgaaattattttgcatattttgaaaacataaaccatagtttttgcctactttggatgtatactttcttttatgaacctgatttttctgtatgacatttttttttttttcagagggcagggagcaatttttctatggcatgtgacagattcctccagttagaaaaagctgttaaaatcaacacatggtgctcttttaccgtgacattttctcacctgtgcacagtgagccgatagcttccttttagtcttcacctctcaaggaaatgtttttactgtcttttcccagacacacagtggggttgagggagctaggctgttttgctagagataattgcaaggcacgtggcactaaaagtcatttttcttctgtggatccataagaggaacatttcctcagtgtagcctaacaatgcagcccccaatctgttcctttttttttttgaaatgggatctctgtcgcccaggttggagtgccatggcaccatctcggctcactgcaacctctgcctcctgagctcaagtgatcctcccacctcagcctcccaagggtgtgtgtgactacaagtacacactaccacgcccagctaatgtgtttttttgtagagatgggattttgccatgttgcccaggctggtctcgaattcctggattcaagtgatcctcccacctcagcctcctaaagtcctaggattataggcatgagccactgtgcctggccctctcatctgatagaaaattagattttgctatgagccatttcctgagggccaatttaatactcgtgtgactcttcttagagttaccatctgccttaaatttcctctgtttttcacattcttggaaatatatcattgttttgcaaatttctatatctaattcagggtttaccaggagcttaataattaatggctacatagcaaggcatcgtcttggaaccggagaattttctctagactattaggctagacagtctcatgattatactaaccaaacctggagtaaagtggttgaaaaaaaagaaagtataaaggggcttattaaagtggttaataaatatgaaaaaaaaaaaaaaaa

SEQ ID NO: 1176 - DNA, 3811 bp, human
tttgcctaaggggataaggaaaaataatgtgaaagttgcagtccttatcagaagtaattgtttgcctaaggggataaggaaaaataatgtgaaagttgcagtccttatcagaagtaattgattagaattcagcaatgaatatgccaaatcgtacttatttcagatgatgcagccaacacgaacggttgtcatgtgtaacacaactttcgatcaccgcgaaaacaccgtcctgggaaagcgtccatgcttgatatcgtttggttcatgaacattaagtttccagtacaggtaaaatcccagaggaatccaaagccctctctttattggctcctgctccaaccatgacaagtctgatgcctggtgcaggattgcttccaataccgaccccaaatcctttgactactcttggtgtttcacttagcagtttgggagctataccagcagcagcactagaccccaacattgcaacacttggagagataccacagccaccacttatgggaaacgtggatccttccaaaatagatgaaattaggagaacggtttatgttggaaatctgaattcccagacaacgacagctgatcaactacttgaattttttaaacaagttggagaagtgaagtttgtgcggatggcaggtgatgagactcagccaactcggtttgcttttgtggaatttgcagaccaaaattctgtaccaagggcccttgcttttaatggagttatgtttggagacaggccactgaaaataaatcactccaacaatgcaatagtaaaaccccctgagatgacacctcaggctgcagctaaggagttagaagaagtaatgaagcgagtacgagaagctcagtcatttatctcagcagctattgaaccagagtctggaaagagcaatgaaagaaaaggcggtcgatctcgttcccatactcgctcaaaatccaggtctagctcaaaatcccattctagaaggaaaagatcacaatcaaaacacaggagtagatcccataatagatcacgttcaagacagaaagacagacgtagatctaagagcccacataaaaaacgctctaaatcaagggagagacggaagtcaaggagtcgttcgcattcacgggacaagagaaaagacactcgagaaaagatcaaggaaaaggaaagagtgaaagagaaagacagggaaaaggagagagagagggaaaaggaacgtgaaaaagaaaaggaacggggtaaaaacaaagaccgggacaaggaacgggaaaaggaccgggaaaaagacaaggaaaaggacagagagagagaacgggaaaaagagcatgagaaggatcgagacaaagagaaggaaaaggaacaggacaaagaaaaggaacgagaaaaagacagatccaaagagatagatgaaaaaagaaagaaggataaaaaatccagaacaccacccaggagttacaatgcatcgcgaagatctcgtagttccagcagggaaaggcgtaggaggaggagcaggagttcttccagatcgccaagaacatcaaaaaccataaaaaggaaatcttctagatctccgtcccccaggagcagaaataagaaggataaaaagagagaaaaagaaagggaccacatcagtgaaagaagagagagagaacgttcaacgtctatgagaaagagttctaatgatagagatgggaaggagaagttggagaagaacagtacttcacttaaagagaaagagcacaataaagaaccagattcaagtgtgagcaaagaagtagatgacaaggatgcaccaaggactgaggaaaacaaaatacagcacaatgggaattgtcagctgaatgaagaaaacctctctaccaaaacagaagcagtataggaccgacaagtgtacctctgcactcaatgctggaatcaaatccaaagcttttaattctctcaacaagatgtaaacaggaaagaaatctagttgagcatgaagataggatctaacagcttttccagttgttagatgactttgtggccatcttgttattgagtaagaaaataaagcatggacatcatgaaaataacagatgttacccaaactcatcttctaaaatctgtgcatttccatggtggctgacacacttgtcatgtggtctgttagtgtttgccaagaaccattgcaaataaattgaacatcaaagatccaagtttgtactatccctaaagactggagataagcattggaggctcttttaaaaaatgctagttactgaattttgtattgttttacttttttttttatttcaatatatacagtttgatgatgtgcttgaaattggtgcaaatatatacacacccttgtaagtgcaaagtatgtaagaagttttaacatttacttcacaggacttgtgattgtgttaaattctcactattgtgttttcttttgctcactgtttaggacaatttttctttaaaatagttttgcagattaaaattgcttaaataagtggattaaaaaactgacaatgcatgctactgttctctttcaaaaggaagagcaaccgtgttgaatactaataatgatgaattagtattcagtgtttagaatcattgggactacccacaaagtgagcatttctttttaaattttcttgacatttccaagcttattatgaataatattgcagtgtgtcttgtcagctgtaggtggcaaaggtgcccttataaaaaaggaaactggcttttcaaaatgggctatgggagcacaagctgaagctttagtgccttctacaatgtggtatactgttttctagaattttatatgtgctagtcattctcaattcatatggaatctagatggatatttcatgcatacccatagagaagtgtgtaagtgatatgtcagaagagcttcttactgatttcacctaaaatgagaaggaagtcctgttttcaagaatgacattagagtcatgcagctttgggaccatcagttttatactgtgataattgaaaatgaaacatgttcttattttccttaaattgaagaaaaccctttagttgtctacattggatggccttattacctctcaatcatcttttcataaatgatgtgcagaaattgtacttaaggacttaggagtatatgggaggttattggttttatgtttaaggatacgtttacttgagtttaagatacaggtcatccatcattcttaggctcactttttacagaaagtatgcaaatagtaaagtgacagcactgctaatgtttttccccagtactataacttgtggtttctgaactcattattgttgtatttccaaaaaagtaataccttttaattagtgtattaaaagttaagtataattattttaatgcaatctaatacaatcagattactcagttgccttacctcatgggaagagttacttttttagatctaaaaagctgaatagcatgttagttacttggtttcaacttgagttttcttttaatgttaataagattgaaactttagtatttagtggggaatggaaagagttgcccttgttgcaagtaatgaagcctgatttgattatgaagctgcttaatcactcttcatgtgttcagaattactgttttttttgtttgtttttcctttttgtcactgtgtacattaaaattttggaagatgctttactatgtaaagtatagatggtcattttaatcattcagccacatacggttggctggtaaacagcttattctgatacaagaatgcttgggtgcatatggaaagattgtgaaagagtgtgtcttgcatcaacagctgtcttatttatgatatataa

SEQ ID NO: 1177 - DNA, 1505 bp, human
gtctcggaccgcggaggtgagcgggagctgaggctgaggagaggggagcttggggggcgcctgctgccaagggcagcggaggaggaaatggcaggtcctaatcaactctgcattcgccgctggactaccaagcatgtagctgtgtggctgaaggatgaaggcttttttgaatatgtggacattttatgcaataagcaccgacttgatggaatcacattgctaacattgactgaatatgatctccggtctcctcctctggaaatcaaagtcttaggggacattaaaaggttaatgctctcagtccgaaaattgcagaaaatacatattgatgttttagaagagatgggctacaacagtgacagtcccatgggttccatgacccctttcatcagtgctcttcagagtacagactggctctgtaatggggagctttcccatgactgtgacggacccataactgacttgaattctgatcagtaccagtacatgaatggtaaaaacaaacattctgttcgaagattggacccagaatactggaagactatactgagttgtatatatgtttttatagtatttggatttacatctttcattatggttatagtccatgagcgagtgcctgacatgcagacctatccaccactcccagatatattcttagacagcgttcctagaatcccatgggcctttgccatgacggaagtatgtggcatgattctgtgctatatttggctcctggttcttcttcttcacaagcacaggtcaatacttctgcgaaggctctgtagtctgatgggaactgtattcttgcttcgctgctttaccatgtttgtgacctccctctccgtgccaggacaacacctgcagtgtactggaaagatatatggcagtgtatgggagaaattacatcgagcctttgccatttggagtggctttggtatgaccctgactggcgttcacacatgtggagattacatgtttagtggccacacagtcgtcctaactatgctgaatttctttgtcaccgaatgtaagtatctttttagtgcttctatgcgtattaggtaactagctgcagtgaaggctgtgggaagggtgtcagatcctgtgaagaatggcaaaacagcctgacctgagaaacgtgactgagaagcattggaaggaatgtagctttaaaatgatctttctgtccttttcctagatacaccaagaagctggaatttcttgcacactttatcctgggttctcaacctctttggaatcttcttcatcttggctgcccatgaacattattctattgatgtgtttattgctttttatataacaacaagactctttttgtactaccatactctggccaataccagagcatatcagcagagtaggagagcaaggatttggtttcccatgttctctttttttgaatgcaatgttaatggcacagtacctaatgaatattgttggccattttcaaaaccagcaataatgaaaagactaattggatg

SEQ ID NO: 1178 - DNA, 1741 bp, human
ccgttctgctctcgggggcaccttccggggttcctaagccgcggggcccctcgctgcccctcgaggccctttccctgacctaggctttggcctgggctactcgttccggagccgccatgtcgtccgacttcgaaggttacgagcaggacttcgcggtgctcactgcagagatcaccagcaagattgcgagggtcccacgactcccgcctgatgaaaagaaacagatggttgcaaatgtggagaaacagcttgaagaagcgaaagaactgcttgaacagatggatttggaagtccgagagataccaccccaaagtcgagggatgtacagcaacagaatgagaagctacaaacaagaaatgggaaaactcgaaacagattttaaaaggtcacggatcgcctacagtgacgaagtacggaatgagctcctgggggatgatgggaattcctcagagaaccagagggcacatctgctcgataacacagagaggctggaaaggtcatctcggagactagaggctggataccaaatagcagtggaaaccgagcaaattggtcaggagatgttggaaaaccttagtcatgacagagaaaagatacagcgagcacgtgaaagacttcgggaaacagatgctaatttgggaaaaagctccaggattctgacagggatgttgcgaaggggttgttctgtgaaaaaacaatgtaacctgtctctggccccaaaggcttgaaccagaaccagccagtggaaattactcaaacacgtattgtgccttcaatgagaagccttctcactgaaagagctgccctggacggaaaatgagtagtgagatgatgctggtggaagtatttatagatgcgcagtgcatgagtacttggcaaggatgctatcaaaggggaaactgacatcaaatgtgctgtggttctgggtgatttatctggtcccttcccatcccagagctttatgattctgtaataatcaagggagaaacccattacatagtggacaattttttttctttttttttctttttctttttttttttgagacagagtcttgccctgtcgcctggctggagtggagtggcacaatcttggctcactgcaacctccacctcccaggtccaagcgattctcttgcctcagcctcccaagtagctgggactacaggcacacaccaccacgcccagctaatttttgtatttcttttttttttttttgtagagatggagtttcaccatgttggccaggatggtctcgatctcttaaccttgtgagccaccgtgcccaaccctaacaattatttttaaaaggaggaatttaaatgagctgtggattattcattttgtcccataagaagataattaaaaaatgacaaaaatgaactgaacaaaaaagttctaacaaaataataaggctgaatttttaaagtctcttccgcatcttctgttccctgggatgccttagacggggtgtgcagtattttaggtacatcgtgagcaaggagcctgcattcccagggggcggcagggacagcatgtaaggtcttagtccagctctgtgatctgaaggcaaagcctctatgtgtgaaacacaggggtacctcaaaaatagaacaagagcactccatccatgtgcggatgactgtcaaggtcactgagacctacagtgatctggaaaattaaagctctctggccgcctttcctctcaggacatacttctggagatcaaaaaaaaaaaaaaa

SEQ ID NO: 1179 - DNA, 1780 bp, human
ggattctgggctctgctcagagtcaggctgctgctcagcacccaggacggagaggagcagagaagcagcagaagcagccaagagctggagccagaccaggaacctgagccagagctggggttgaagctggagcagcagcaaaagcaacagcagctacagaagttggaacgatgctggtcaccttgggactgctcacctccttcttctcgttcctgtatatggtagctccatccatcaggaagttctttgctggtggagtgtgtagaacaaatgtgcagcttcctggcaaggtagtggtgatcactggcgccaacacgggcattggcaaggagacggccagagagctcgctagccgaggagcccgagtctatattgcctgcagagatgtactgaagggggagtctgctgccagtgaaatccgagtggatacaaagaactcccaggtgctggtgcggaaattggacctatccgacaccaaatctatccgagcctttgctgagggctttctggcagaggaaaagcagctccatattctgatcaacaatgcgggagtaatgatgtgtccatattccaagacagctgatggctttgaaacccacctgggagtcaaccacctgggccacttcctcctcacctacctgctcctggagcagctaaaggtgtctgcccctgcacgggtggttaatgtgtcctcggtggctcaccacattggcaagattcccttccacgacctccagagcgagaagcgctacagcaggggttttgcctattgccacagcaagctggccaatgtgctttttactcgtgagctggccaagaggctccaaggcaccggggtcaccacctacgcagtgcacccaggcgtcgtccgctctgagctggtccggcactcctccctgctctgcctgctctggcggctcttctccccctttgtcaagacggcacgggagggggcgcagaccagcctgcactgcgccctggctgagggcctggagcccctgagtggcaagtacttcagtgactgcaagaggacctgggtgtctccaagggcccgaaataacaaaacagctgagcgcctatggaatgtcagctgtgagcttctaggaatccggtgggagtagctggtggaagagctgcagctttatcaggcccaatccatgccataatgaacagggaccaaggagaaggccaaccctaaaggattgtcctcttggccagctggtgctgcgaatcctgcctgctctgatcctcttgacccttctgggaatgtttgcacacctgacactcttgtgagactggcttatggcatgagttgtggacacctatagagtgttcttctctaagacctggaaagtcagcaaccctctgggggcagcaggactgggcagatcccaggctgggcatgggggtggcagaagagcccgagaaattgggtcagttccctcatcagcaccagaggctcagctgaggcaagaagagcaccatcactgcctatttctaggggctatacactccaactcttggttgatctctttctttttaaaaatatttgccaccaccctggagtctagaccaacacacaaagatcctggctaaccctggcctatttagattccttcctctcacctggaccttcccatttcaatcatgcagatggtttctttttgtaaagagttccgtttgcctttcaatttttagagaaaataaagactgcattcatctcaaaaaaaaaaaaaaaaaaaaaaaaaaaaaaaaaaaaaaaaaaaaaaaaaaaaaaaaa

SEQ ID NO: 1180 - DNA, 2459 bp, human
gcaaccgcagcccagccccagtccgggaggaagttctgccgggcgctctccgccggtgcctcactggttatagtgctatacaggaaacctggcagcgccggagccgcgcggtcgaggagggagcgcgggacgccgagcccacgcgcgcctgccgggacaagtggagacgaggccggcgagcggacgccccgaggttggcgaaggagctgtggccgggtccccttcttatccagcccgagacactgcgctccggtgggcgtccctgcgctgggaatccctctcggagtttttccaggcccggccgggttgctccgggaaaggccctgttgggggaggtgggcccggagctggcaggtctacaatccggttggaagggctcgcagtgggtgattcagggtgccaatgacctccccgcgaacgggaacgcccgcactagacaaccagccccagaccggcattcccagagccgcaggcgggagggacgcagggactccgggacagcaaatccccgggggagaagggaagggggaaggcgggacaggggaggcccaccctccttgggctccgctagcgaccagccagcgccccttcagacgcagccttcctggctccggaccccggctttctgctccggtcctcgtcccaatgccccccaaggtccccagcagaggcattcaggttcctcctcgccccgcccagacgcagcttctttgggtatgggtgacagcactcctgagcgtcgctgtccctattcgctgccgttgccagctccgattccgcgaaacctctccggcaccacctcggaagccccgcccagggcgatggtccgggcctaacctgccggccccgcccacccggcccttgggctccctgaggcccgcccagcagacaccggagagcaatggtgtgatctccgcacactgcaacctctgcctccagggttcaagtggttctcctgcctcagcctcccaagcagatgggactacaggtactggtagttaactctcaaggagaaatttcacggttgagcaccgaaaagaaagtggtcatgaaaggaagtatcaacaattatcttaaattgggtcaagaagggaagtatcgcgtctaccacaatcaatactccactaattcatttgctttgaataagcaccagcacagagaagaccatgataagagaaggcatcttgcacataagttctgtctgactccagcaggagagttcaaatggaacggttctgtccatgggtccaaagttcttaccatatctactctgagactgactatcacccaattagaaaacaacatcccttcatcctttcttcatcccaaccgggcatcacatagggcaaactggatcaaggcagttcagatgtgtagcaaactcagagaatttgcattggctttagccattttggagtgtgcagttaaaccagttgtgatgctaccaatatggcgagaatctttaggacataccagctttctccctttgtctcataaccatgtccaccaatgagaatgctaatacacaagctgcccatcttcacagatctaagaacaagggaaaggacagtacagaaacgaggcgtcacagaatagaggtcaatgtggagctgaggaaagctaagaaggatgaccagatgctgaagaggagaaatgtaagctcatttcctgatgatgctacttctccgctgcaggaaaactgcaacaaccagactcctgccctaagagccatagggaatatcgtcactggtacagatgaacagactcaggttgtgattgatgcaggagcactcgccgtctttcccagcctgctcaccaaccccaaaactaacattcagaaggaagctacgtggacaatgtcaaacatcacagccagccgccaggaccagatacagcaagttgtgaatcatggattagtcccattccttgtcagcgatctctctaagattttgagacacaaaaggaagctgtatgggccgtggaacagttgaacagattgtgtaccttgttcactgtggcataatagaaccgttgatgaacctcttacctgcaaaagataccaagattattctggttatcctggatgccatttcaaatatctttcaggctgctgagaaactaggtgaaactgagaaacttagtataatgattgaagaatgtggaggcgtagacaaaattgaagctctacaaaaccatgaaaatgagtctgtatataaggcttcattaagcttaactgagaagtatttctctgtagaggtgagtaatggatggtaatattaataacaacttggaaaaatgtaaagccaaggccatgagcccttttttccctcatacttttaaaaatgagcctcatatctttgttaaatatagtaaaatatcagtgtgcataggacgtaatgtacttattgcccctctgatgtttggcttgatggtaataaaatctatttatttatttattt

SEQ ID NO: 1181 - DNA, 3014 bp, human
caaaccgctacggcgtttgaaagtgtccgggttgcttaggatccctacaggtagcgcctctggatacatgcgtggtctgctgacccagagagaaacgaaagcagaactgtttggcgggagatcatgtcagccgtggtagctcagacgctgcatgtttttggtcttcgatcccacgtggccaacaatatcttctacttcgatgaacagatcattatatttccttcaggaaatcactgtgtgaagtacaatgtggatcagaaatggcaaaaattcattccaggctcagagaagagtcagggcatgttggccttgtccatcagtcccaatcggcggtacctcgctatctctgagactgtgcaagaaaaacctgccatcaccatttatgaattgtcatccatcccttgccggaagcgcaaagttcttaataattttgacttccaagttcagaaatttattagcatggctttttctccagactccaaatacctattggctcagacgtcacctccagagtcaaatcttgtctactggctgtgggaaaaacagaaagtaatggccattgttagaatcgacactcagaacaaccctgtctaccaggtgagcttcagtccacaggataacactcaggtgtgtgtcactggaaatgggatgtttaagcttctccgttttgctgagggaaccctgaagcaaaccagctttcagaggggagaaccccaaaactatctagctcacacctgggtggctgatgacaagattgtcgttggcactgacacaggcaaactcttcctctttgaatctggagatcagcgttgggagaccagcataatggtcaaggaacctaccaatggctcaaagagcctggatgtcattcaggaatcagagagcctgattgaatttccaccagtcagttctccactcccttcctatgaacagatggtggcggccagtagccatagccagatgtccatgccccaggtgtttgccattgcagcctattcaaagggatttgcctgttctgctgggccagggagagttctgctgtttgagaagatggaagaaaaggatttttaccgtgagagcagagaaatcaggattcctgtggacccgcagagcaatgatccaagtcagtctgacaaacaggacgttctctgcctgtgcttcagcccctcagaggaaactctggttgccagcaccagtaagaaccaactctacagcatcaccatgtccctgacagagatcagcaagggggagcctgctcactttgagtatttgatgtatccattgcactcagcacccatcaccggtctagctacctgcatccgcaaaccccttatagccacctgttctctggatcgatccatccgcctttggaattatgaaacaaacaccctggaactatttaaggaataccaagaagaggcatattccatcagccttcatccatctggacacttcattgtagtagggtttgctgacaaactacgcctcatgaatctactcattgatgatatacgttctttcaaagaatactctgttagaggatgcggagagtgttcctttagcaatggaggtcacctgtttgctgcagtcaatggaaatgtgattcacgtttacaccaccacgagcctagagaacatctcaagcctgaaaggacacacagggaagattcgctcaattgtgtggaatgcagatgatagcaaactgatttctggtggcacagatggtgctgtgtatgaatggaatctgtccacaggaaagagagagacagaatgcgtgctcaagtcttgcagctacaactgtgttactgtctcccccgatgccaaaattatctttgctgttggatcagaccacaccctcaaggagattgcagattccttgatccttcgagagatatcggcgtttgatgtcacctacaccgccattgtcatctcacattctggacgcatgatgtttgtgggcacctcggtgggaaccattcgtgccatgaagtaccctctgcctctgcagaaggaattcaatgagtaccaggcccatgccggtcctatcaccaaggtgagcaggaccctctccccaggaacccagtcccacacctgcctgctacgtgccttgttcatcccttcaacctcccaatgtcttttctctctccttcttctctcttatttattcatccatcattcattgaatcaccatctattgactatgaatatactctttgtttaaactacttccaggaatttagcctaggaaatcatcagagatacacctaaaaatgtatgtacaacgttttcaccataatattatgcataataaggggccgtttggtggatgccgtagctgccgtgagtgtgggctgcacttgaccacagctgcctcctcctccagagaatgccccagactgaaaggagccatagccctgaagattggcccctacctctccctgagggtacaaaaggccaccccaggggcaataccatgagtacacatttgtaaattgtccttccattcacccttctcataaagtagtatctatgttcaacagtcaaaatgtggaagcaaccaagcatccatcgacagacgaatgcataagcaaaagatggtatatctatacaatggaacaataccctgcctaaaaaggaagggaattctgcaatgtgctaccacatggatgaaccttgaggatgttatgctaaattaaataaggccaaccacaaaaagataagtacagtgtgattccacttttaggagatacttagagcagtcagaatcacaaagacagagtggtggttggcaggggctgcaggaagggggaatgaggaatgattgtttcataggtatagagttttggttttacaagacaaaaggattatgggggtagttggtggcaatggctgcacaacattacaaatgtatttaataacatgaactgtacacttgaaaatggttaagatagcaaattttacagaatatgtattttacgacaattttaaaaatgaaataaaaaagaattatcttgc

SEQ ID NO: 1182 - DNA, 759 bp, human
atgtggcgcgcgccggaagcggctctgaggccggaagtgagcctagagcgccgcggccccgagatgaagccggcggtggacgagatgttccccgagggcgccgggccctacgtggacctggacgaggtggcacgggcccggcgggagtctccgagcgcgggaggcagcaccgggctcttgatggacttggcagccaatgaaaaggccgttcatgcagacttttttaacgattttgaagatctttttgatgatgatgacatccacagctcaggactgcccaggacaagccagcagtcctccatggttcccgcactgcagcgagggcagtcggagcacggggtccgtgggaaggcagcagagcggcctgtggtgtcggaagagagatgtgaactgaacgggagagaagtggcagctttggacagagcgtttgggagcacaggccatgggcagggggcggaggcgctaatgtttaccagatgcagagaacatccgctgtgtggcaccaacaaagcaacaagtgaggggaaaatgggcacaggacgcttaagaaacagtttacggaagaaccaatccaagtggctgggaagttatctagaggtgctcagaaccacaagaagcaggcgagaggtcagcgaagacagcacaatatcagtttctactcactggaggggtaaatgttttaagagtgatgaaacaccatccgttgctggtggagaagaagggaagaagaccacacagccatgcatagatgtgaggtag

SEQ ID NO: 1183 - DNA, 2735 bp, human
atgcaggtggaagagggtaggagggatgctggtgccattagcagagagggctagaccagaacatgcctgctttttcaacacatgtaagaagtgcctttcatctcctgccatgattctgaggcctccccagccatgtggaactggaaatccaattaaacctctttttcttcccagtctcagactgcagctgaatatgtaaaatctcgactcccagaggcccttaaacagcatcttcaggactacgagaaagacaaagaaaatagtgtattatcttaccagaccatccttgaacagcagattttgtcaattgaccgagaaatgctagaaaaattgactgtatcctatgatgaagcaggcacaacgtgtttgattgctctgctatcagataaagacctcactgtggccaacgtgggtgactcgcgcggggtcctgtgtgacaaagatgggaacgctattcctttgtctcatgatcacaagccttaccagttgaaggaaagaaagaggataaagagagcaggtggtttcatcagtttcaatggctcctggagggtccagggaatcctggccatgtctcggtccctgggggattatccgctgaaaaatctcaacgtggtcatcccagacccagacatcctgacctttgacctggacaagcttcagcctgagttcatgatcttggcatcagatggtctctgggatgctttcagcaatgaagaagcagttcgattcatcaaggagcgcttggatgaacctcactttggggccaagagcatagttttacagtcattttacagaggctgccctgacaatataacagtcatggtggtgaagttcagaaatagcagcaaaacagaagagcagtgaacccttcaggggtctcagctgccttagactaaaggactttcaacacactggtctcttttaatttagtgaaaagtgtgggagttgtaattaggatcatccaccccagacatggaatcccccctccctggtggtcttaggtctataatcagtgacgaacagagggtgcccttggccaatgtagttaagaaactggaaaatggtttcttcatgttttcccaactctttcatccagtgtccaaaatatataagtaaatagctgtagagtcacatatatgaagtgaatagcatatgtgtcatttagtctccctgaagattcttttcaagatcctgttcagggtcctccaggcatcagctgttgtgtcctctctttgtaacagtggacaggacagaccacccagtgctgcaggagacaggccactgcgtcacctgtgagtggtcaggggctgatgtggcaacaccctctgccaagagacagagctgtcctgagaatgctttgtccttctgagcccatgttttctgctcagtagcagcttggaagcagatttggaatggtttactattttggctgctcttggggactgcgagaagcagagagaatgagagaccagtggcaactgcctgcacagcagagataaccctcttcccttgcttcctttaatagttaaatagactttgtataccacctgaccagcctttgtgcatttatcctaatcatgcatgaccgttaaccttttgcttagtccttaccatatgtaataggcagctgttaaattcaccaacagataccctgatttttcatcttacgtgaccaagaaaccacgttaggggaaatgaaaaaagcaagccacaataccatgattccttccattttcaacagtagatgaaggaaatgatactgaatgagtcacagtgttccctggcaagtaagctgtttgcattgagaaaggagtgagctggtgaggttaccaccctgaattgagctccagctgccagtttttgtgtttttccttgcccctttccaagtggttttcaagtgtcaggcagtgttctgagaagcagcagcctataactgtatgtgtgttccttgaagccaggtgcagagttcccagctactgcagcttgggatttggtgggaaactactgggataagcttctccttgacaatggaaaggcagcagtcttcaacatttggttgcaaatctccatccacatcagggagctttccccaggcaaatacaaaccgccccgtggcctgcaggcctgcaggggaggcagcaaagggacctggcagttgcaacacagtaagtcaggaattcaagcgtgaacccatattgataagtgggccagaattatttaggggcctggcttgctgctctccatttcctgtatcgctaatttatcatttttccaaccttggtattttatattatttagagaaaatgctgggtcactctctttgcctaaggtgactcaaacagccaaacgaaacttccgttgcctcccagccctctgtatccacctggttttgttctttccctgtgagcatttgtggttatagcttcccatatgccacattcaccggccacctcctcgccgtggaaccctgccctctcccctcctgctgctgtagagttttcccaaagcagtgtccaggatagaatttgagagagtgaagaaattgccttgtagatgtggagggctgcaatctgtcttgatttctccaagcacttaactttctttgactgcactgagaattgctaatgatttcccatgagatttgcttacttttgtatactgtattttccagcattacagaaccttggttattgttttttagccatagaatcttctagtaaaaaatatctgccacc

SEQ ID NO: 1184 - DNA, 1900 bp, human
agccgcggggagcgaggagcgcgcggagccggccatgggcaagtcagcttccaaacagtttcataatgaggtcctgaaggcccacaatgagtaccggcagaagcacggcgtccccccactgaagctctgcaagaacctcaaccgggaggctcaacagtattctgaggccctggccagcacgaggatcctcaagcacagcccggagtccagccgtggccagtgtggggagaaccttgcatgggcatcctatgatcagacaggaaaggaggtggctgatagatggtacagtgaaatcaagaactataacttccagcagcctggcttcacctcggggactggacacttcacggccatggtatggaagaacaccaagaagatgggcgtggggaaggcgtccgcaagtgacgggtcctcctttgtggtggccagatacttcccagcggggaatgttgtcaatgagggcttcttcgaagaaaacgtcctgccgccgaagaagtaacttgttaaatgtaatgggaaggtggcagacttaagaacgtggatatgaagtgcctagaaccaccacaacctggctgtgcgtctgtccctgtgggtgtatgtgcttgtgtgtgtgatgcatgtgagcgtctctggcacacacacttggacatacagttctgtgtgcgctcattcttattacaggagtgagcaaaggaagcatttaccccgatggttacctagaccacgattatttggattggggggaggggggatccgttttttttttttaattttttgttatttctaagcaaacctcttttgtacttttcttacttctaatatccatccctggactttttgtattccaaatgtttgtgatgctgagaagtgaagttcattttatgtgatcttcatgcgtcgtaatctacttttggtagataattaagattattaaaccctcatttaaatgtgacataaaatacagctttaagcacataaatataaagcagcttccatcaggaacatggagcaggcagggactccattttacagaattactgagatttctcagttgtaaaacatgatgtcatcctgcatgcctcctggaattctccaatggggtcgccaaacaacaaatggagaaaaaaagttttacttccttgcattcttctacctttaaatagcaaagtaccactaccaccaccacctcttgcccccttccctcttttcttaaacttctggcatttcagagctcagcaggctacccctggtttctggagagttgggctaggcctgaagctccccctcccccacctctgctaggcagcccaggcctggtctgggagacagcccctcaccctgcctgggctcttggccaagcggccttggatggatgaagtcagagaggtggggtgagggtgagcttactcagggcccccagaggaagccctcagcctctgccctccccccacacagggcgggagcccaggcctgttcctggcagctgtggctgcagctgtgctcctgctccctcctggaatgtgcgacaagcccaaatgttccagggaggcggccggggcagggggcttagaagtgctaatatggttctgtgttttgcctgaaacgataccaggttcccctgaatagcaactttacaaggtccatgtgggagggaccaacccagatgccctgctgagtgtccctgaaaccatggcagctccatctgtcaagatggcaggggccggagtgagggggctgctggcttaacagcaggcatctgggcaggccagtcctcaaagcagctcctgaaggtctgtgttgcactgtcaccagtctcaagctatgcctctaatttcaccagggatattgactaagaagacaataaaatctttttctttgtgtaaaaaaaaaaaaaaaaaaa

SEQ ID NO: 1185 - DNA, 4003 bp, human
gctggcggcagtggccggtgtgagcgcagagccgggccctgggcagcagcggcagcgcggtaggacctcgcgcagcgtccgcgggctccggggcgggggcgccagcggcgaagccccctccccggggaggcgggacctgggggagctcccgagccggggagcggcggcggccgggaacgatgcatcagaagctgctgaagagcgcgcattacatcgagctgggcagctaccagtactggccggtcctggtgccccgtggcatccgcctgtacacctacgagcagatccccgggtccctcaaggacaacccgtacatcaccgacggctaccgggcctacctgccgtccaggctgtgtatcaaaagtttgtttattttatctaatgagacagtaaacatctggagtcatttgctgggtttctttctcttcttcaccctgggaatatatgacatgacatctgtgttaccttcagcaagtgcgtccagagaagattttgtaatttgttctatttgtcttttctgcttccaggtctgtatgctttgctctgtgggctatcatcttttttcctgccatcggtcagaaaaaacatgtcgaagatggatggcattagattatgcaggaatttctattggaatactgggctgctatgtctcaggagtattttacgcattttattgtaataactactggcgtcaggtgtacttgatcacagtgcttgctatgatcctggcagtgttctttgcgcagattcatcccaattacctcacgcagcaatggcaaaggctccgttctatcatcttttgttctgtttcgggatatggagtgattcctactcttcactgggtttggctcaatggaggaattggtgctcctattgtacaggactttgcaccccgtgtaattgtgatgtatatgattgctcttcttgctttcctattctacatttccaaagtcccagagcggtactttccagaatcacttccacggtgaatcagagaagggattgtaccactcgtcacgtgtgttgggaaagaagaaagggtgagaaaccctggcctaaacaatccatcccacagatcctcaggcattcctttgtgtacttggtttttcaccactgagctttaaataagaatggaaatacaagggaaaacctgcgttgtaaacatgaggatttgggaacagatctaggacatgccactgaattgaagaccacccatcttccaggcagggccagaattacagaaaacaattctggacaactaaactacctcggatcaagccaccaaatatggcatatccttgcagtagtgatgttatattggtggcatcagtcaacagtgtatgtcatgcagtacagacatagcaagccttgtcctgactatgtttcacatttgtgaattaggtatggccacctggtgaattcagttgttaagcaatatataatggggaattgtataccccactatttctaagattcccattagttttccctttttcctttttaatatgagtaatgctttataaaaatgggaaaaaaagtatacttaaggatctgtagtaataactgctttacaaaatccttaaaactactaatttgctgcttgtacagaaagtgaaaattagttggcaatcataagaaacatctgaataacaacgatgaatgggaaactagtgttgaaataggattcattttacttagcaccagcttaatttccttaggaagggctcatctccattagaaaatggagtcatcttatgtgcttaattattttcagttaattgtcaagtttaagtgcctaatcaaggcaagtgttgtttcagcctatgcttaatgcaagctaggatagtgattttaaataatcactaaaatcactagatttaaataatcactaaaatgatttgtgagaaactggcacttcagatattatatcctttagctataggttcttctctccctaagaacattagatattttagttttccagaacaaaagctttaaacttctgcagtaagttgagagaagggttgagaagaggaaaagaacttctcattttctatcagataagaatcacattagaaactaagtacaagattagacaacaaattatgtggtcaaataatatagtcattagccacctaaacattttaattccagatattatttaattccatataataactgaattcttgtgagtggattacaggtttttgatcccaaaattccagagctttcaactctctgaatttgtagtcctgaatatcccagtggtgggggttcccagcattgtgggtgctacttgcaaggccatagaatctagatggccctgtcttgaccctgaaatgaaccttaagccttagaacaaagtcatgcagatgccccatttgataataatcttattcacctgtgctctggtcctcggtttctgcatgtgttagcattgcattgataactcagaatcttgataaacacttaatatttgggcctgaagcattaaactttctttttattgtatatacttaaaaaatagaactcactgccctatcatacattgtagccctcttattctttggtctttcatatgcattagttaaatcccttaaagtagacattcataaaaacttacattgtttattggagtataaaatattacccaagtttcttcatgagttgacatgagctgttttaaatactggtgtattttcagaacagtaaaattactgaatatcagaaaaaatgttaattgatgatgaagcttattcccaaaatgccttttgtgcatatgatacttggaaagtcactaatgtgcctcagttaatacatcagtaaaatgttgtgtttcttttccagtgtagtgtttttggaatataaattccccatgctagtatagtatctcagcaaagagaatttccccccaggaggctcagtaaaggaataccgtgtcttacccatcgttatgatggaaggctgctttgaaaatggctgttttaccttataaggttaaaattttgatccatatgttaagtgatagaagattttggtgcaacagtagtaggatatatttctcctagaacatcccttattggcttacatgattttattgccttttaatagatattttgtcattttggccaaacaaaagacactgagtagttacacttaagttaaaaatgaggggaaaatcattattttaggtgtggagccatttttattataaaactttctcaataaaaaaacattgaatcatttcaatttttgcagtccctgtattagtatatgaatacatacttgccatttgaattaataacatgaaaagagtatactgtgtttttaaatccgtgtttctttgaatttaaagggtgtacaggtctttctgtagggaaaattattccatgtaaacatttcaactctgtatgaaaatgttaaatattgtaagaaagttatcctctcattttttcactgctatgatatatttattataaaatagggaatgaatgaatgaatatggattgctgttaactagaaacacttctgtatgtcagtcagcatttaatgaccacctactgtgtgcacagcactactggtaaaattttgaagacattgttaacattaaaaaatattttaaagttgtctacaaatctgagccttgtaatgatgtatatttaagttatttttgtttttatagattaaagtaagattatactatccagttttattactaaaaaagactggttttaattttaccaatgtgtgaactataaaagctttttgcctacagattttacattttaaagttatctatggctgttttaaattgtctagcaatttatatggttgtggttaactcatttaagaaacaattatctttctatattaagccattttcaaatagcaagacagtgcttgtctttttttgttattacactaactgcaattcagtaagctgcatgacaaaatatgtattatgtaaataaactgggtttactaaataaaaaaaaaaaaaaaa

SEQ ID NO: 1186 - DNA, 726 bp, human
gcggcatcgccggcctcgctatgtctgccattttcaattttcagagtctattgactgtaatcttgctgcttatatgtacctgtgcttatattcgatccttggcacccagcctcctggacagaaataaaactggattgttgggtatattttggaagtgtgccagaattggtgaacggaagagtccttatgttgcagtatgctgtatagtaatggccttcagcatcctcttcatacagtagctggggaaaatgccagaatgtagttgccatcagatttgattgtgaacaaggactgactgcagaaaataatggaaaggatgtttaactcttttatctccgaacattgaatgagataaatttccagatgctgttctctattttaatgttattggaccaatgttctgtataaacaattaagatgtaaccatttaatagtctgtaacaatcaacctcagtactgtcactacaatattacattctgcaaatgttattctgttgtatcagatacaaaattttagtgaggtatctctaaggcacatagtagaaaacaaaattggttaattactcaagttcctttcactgtgatttggaaatgatttaatctttatagaatgagaaccttttttggactagcttttttattaaaatggctcaatttgtgttgaaaaaaaaaaaaaaaaaaaaaaaaaaaaaaaaaaaaaaaaaaaaaaaaaaaaaaaaaaaaaaa

SEQ ID NO: 1187 - DNA, 3549 bp, human
cccttgtggagcccgagctctcattcacagctttctagagaaatctgagcccgaacctgccagaataggggatctcacccacccagttcagcagcgaggacacctgcagaaatacattcccaaagcaaggctgggcggccgtgtgaagtaagcaatggcctcagttttgcttctgttttggatgaacaccaccacatagggcctgaatgtgaaagaagaccctctatttgtctgttccggggcagcctggtagtaaaacactgttgaatgggccacagtttcagcagaccatcaggtgaatgggaccagtctctcttcttccaaaatatcagaagttaaacacttggaacggagatttggccaagatgacccatttacaggctggactcagtccagagactatagagaaagctcgcctggaactgaatgaaaaccccgatgttttacatcaggatattcagcaagtcagggacatgatcatcaccaggcctgacattggatttttacgtacagatgatgccttcatcctgagatttctccgagccaggaagtttcaccaagcggatgcctttagactcctggctcagtatttccagtaccgccagctaaacctggacatgttcaaaaacttcaaggcagatgatcccggcattaagagggctctgatcgatgggttccccggggtgctggaaaaccgagaccattacggcaggaagattcttttgctgtttgcagccaattgggatcagagtaggaactccttcacagacatccttcgtgccatcctgctgtcattggaagtcctaatcgaagatccggagcttcagataaatggcttcattttaattatagactggagtaatttttccttcaaacaagcctccaaactgacaccttcaatccttaaactggccattgaagggttgcaggacagctttcctgcccgctttggaggagtccactttgtcaaccagccctggtacattcatgccctctacacactcatcaagccatttcttaaagacaagaccaggaaacggattttcctgcatggaaacaatttaaacagccttcaccagctaatacaccctgaatttttgccctctgaatttggaggaactcttcctccttatgacatgggaacttgggcccggacgttactcggtcccgactacagcgatgaaaatgactatactcacacatcctataatgcaatgcacgtgaagcatacgtcctcgaatctggagagagaatgctcacccaagctgatgaaaagatctcagtctgtggtagaagctgggaccctgaaacatgaggagaagggagagaatgagaacacccagccactcctggctctggactgaaccctgagtcaccccaatgctcctgcacactggccttcagtggtatcagccacccaggaagcacatgcacaactgacccatgcagacacgtgtgttctgcttgacacaaggtcctccactcctgaacccctgcagtgactgtcaccagccatcggtctgagcagccaaagttggacaaagacttgagagatgcttttttttccccccagtgaggggactggaggatgatgcaaggcatttatgtaaaaaagattctccctcctttcatatttattgtagtaaattgaaaaaataaagactaaatttgatggacacactgcattaggacaagaatttttctgaggtatcacacagggaccctctccagtttttgaaaattaagtgcatttccaagtaaatgtatcagagttaaactgtacagacaccactgtcaagtttcatgtagtacaaagccctgagacaatagtatctccagtaatttccattcttactgaattatttcctttgacctcatcaccagcatcgaattgttcagcctaagagcatgttctcataggtctgggtatttgcaaagtttgcttattttgatgatatcctgcaaaaaattattttgatgtcacatctcttgtcaggtcactagctgactgtcatgagctgacgttaaaggaagacacatggacgtgaaatacgattatttcatctgagcaatgtgagttaccacaggcagctcaaaagcccattagtgcagcatgtgtctgcagaggagatgtctcatgaaaatcacatgtcagtgattaatgaatccattccagttgcctcaactgggtcactacagcaaagaaaagtgctatcaaaccatttacccttgcccccacaaccctcctgcaaccattaaagatgtggagaaagaccatggttgttgctgagagggtaaatattcaatcatggagcatgacccatatggatggctaaatatgcaagtactgaagtaagagaagactagaaatgcaggatgaaatgtcaaaggtcattttatttacctagtctccttagaaatggagtccccaactactcattcaaaagaaatcagacataaaatagacatcatatatgatatccttacttgtgccatgttttccaagaccagtgcatatttttagacatctcttattcgcccagccatctgcatgacatgggtatttattagtattaccagttggtgctcaaagtcaaacaaaaatattttagttaataatgggcagtaaaatatgattttacattattttaaatatttgggagagttaatttgttagctaaataattcaagggaaagagattattcaactggtcataatcacccctgataatattattactaatcttaattatttattacatcatctctttctcaatggatctaatgttttaattttttcccctattggtagagaacaataacagaagtaatttttatattatacacttggagaaataaagttgaaacagaattaaaaatatttctcaaacaactgtatcacaatataaattaaactaattcatttttgtgtagacatacgaaatcacaaaaataataacactgaaataattctaccaatgcagtgatggaaacacttttcttatgtaccaagacatagataggtaagagaaataaagaattgaagtgaattagaaaatccattttattgcttgggtttaaaatagttgtgggatacaagtatttacaatgctattggagtcaattattgacaacactttgcaacagtaataccatttctagcttttcaattggcaatacttagaaccttactgtagtgacctgattttaaataccatattatatttactaagttaagagctagtttttactctcttccataatttcattacatgaatgtaagatgatggctcaaaaatgacgacttatagtttgaatttatgtgtatgcaatatacatatgagaaccaaattcaacaagtgacatgaatgttactacatgaacattgaattgtattgcccttgtcagttatttcctctgttcaataaatactgaaggtcacaaacacctttttacttttcaaaaaaaaaaaaaaaaaaaaaaaaaaaaaaaaaaaaaaaaaaaaaaaaaaaaaaaaaaaaaaaaaaaaaaaaaaaaaaaaaaaaaaaa

SEQ ID NO: 1188 - DNA, 1980 bp, human
agacactggacttgtaaacgaaaagcttcataagtccctctttgcttagtacttttctcgtcctttccccagggtgcacgtaaccctcaagcactaggaccgtgcggaatccaggctgcgatggcaccttcatttaccgcccgcattcagttgttcctcttgcgggcgctaggctttctcataggcttagtaggccgagcagctttagtcttagggggtccaaagtttgcctcaaagacccctcggccggtgactgaaccattgcttctgctttcggggatgcagctggccaagctgatccgacagagaaaggtgaaatgtatagatgttgttcaggcttatatcaacagaatcaaggacgtgaacccaatgatcaatggaattgtcaagtacaggtttgaggaagcgatgagggaggctcatgctgtagatcaaaagcttgcagagaagcaggaagatgaagccaccctggaaaataaatggcccttccttggggttcctttgacagtcaaggaagctttccagctacaaggaatgcccaattcttctggactcatgaaccgtcgtgatgccattgccaaaacagatgccactgtggtggcattactgaagggagctggtgccattcctcttggcataaccaactgtagtgagttgtgtatgtggtatgaatccagtaacaagatctatggccgatcaaacaacccatatgatttacagcatattgtaggtggaagttctggtggtgagggctgcacactggcagctgcctgctcagttattggtgtgggctctgatattggtggtagcattcgaatgcctgctttcttcaatggtatatttggacacaagccttctccaggtgtggttcccaacaaaggtcagtttcccttggctgtgggagcccaggagttgtttctgtgcactggtcctatgtgccgctatgctgaagacctggcccccatgttgaaggtcatggcaggacctgggatcaaaaggttaaaactagacacaaaggtacatttaaaagacttaaaattttactggatggaacatgatggaggctcatttttaatgtccaaagtggaccaagatctcattatgactcagaaaaaggttgtggttcaccttgaaactattctaggagcctcagttcaacatgttaaactgaagaaaatgaagtactcttttcagttgtggatcgcaatgatgtcagcaaagggacatgatgggaaggaacctgtgaaatttgtagatttgcttggtgaccatgggaaacatgtcagtcctctgtgggagttgatcaaatggtgcctgggtctgtcagtgtacaccatcccttccattggactggctttgttggaagaaaagctcagatatagcaatgagaaataccaaaagtttaaggcagtggaagaaagcctgcgtaaagagctggtggatatgctaggtgatgatggtgtgttcttatatccctcacatcccacagtggcacctaagcatcatgtccctctaacacggcccttcaactttgcttacacaggtgtcttcagtgccctgggtttgcctgtgacccaatgcccactgggactgaatgccaaaggactccctttaggcatccaggttgtggctggaccctttaatgatcatctgaccctggctgtggcccagtacttggagaaaacttttgggggctgggtctgtccaggaaagttttaggaggaccttctgcaaggttaatgtgtgtgtgtgtttgtgttcgtgtggtggtgtttctattaattgggtgaaaccaagcaccagcagacaagcagagaaacaactggggaatttattgactcatttagttattctttctacttttatttccttctctaactgttggtcttactaaaatggtaatatttgcttcttgcttttatgttactggaaaattaggacatgtaaatggataagtgcaataaagtttcctaaatgctg

SEQ ID NO: 1189 - DNA, 1747 bp, human
atggggaggcgctgctgccggcggcgcgtgctggcggccgcctgtctgggcgccgcgctcctgctcctatgcgccgcgccccgctccctgcgcccggcatttggaaacagagccctgggctccagctggcttggtggggagaagagaagccccctgcagaagctctatgacctggatcaggacccgcgctcgaccctggcgaaggtgcaccgtcagcggcgcgacctgctgaacagcgcctgtagccgccactcacgccggcagcgcctgctacagccggaggacctgcggcacgtgctggtggacgacgcgcatggcctgctctactgctacgtgcccaaggtggcctgcaccaactggaagcgcgtgctgctggcgctgagcggccaagcccgcggcgacccgcgcgccatctccgcgcaagaggcgcacgcgcctggccgcctgccctcactggccgacttcagccccgccgagatcaaccggcgcctgcgcgcctacttggccttcctgttcgtgcgggagcccttcgagcgcctggcatcggcttaccgcaacaagctcgcgcgcccctacagcgccgccttccagaggcgctacggtgcacgcatcgttcagcgcctgcggccgcgcgcgctccccgacgcccgggcccgcggccacgacgtgcgcttcgcggagttcctggcctacctgctggacccgcgcacgcggcgtgaggagcccttcaacgagcactgggagcgcgcgcacgcgctctgccacccgtgtcgcctccgctacgacgtcgtgggcaagttcgagacgctggcggaggacgcggccttcgtgctgggcctggcgggcgcatccgacctgagcttccctgggccgccgcggccccggggagccgccgcctcccgcgacctggcagcgcgcctcttccgggacatcagccccttctaccagcggcgcctcttcgacctctacaagatggacttcctgcttttcaactactccgccccctcctacctgcggctgctctagcggtcctggaggtcctgtggccacgcggggcaagtgcctttccgacaagacccccggggaatgcaggtgctgccggccccaggacccctcttcaagagccactgcgtgcactcacctggccgccgggccagcgggcgcagggcacacctggccaggcttgggggcagcccatctcaggtggccctgcacgcgtgtgcctgcctcggcctgtcgcctgaggcctgcttcctccacttgctccagctgacaggcacctctccaggccccgtagatgggcaaggacttgataaccagggttttaggcttttaaaggccattttgggggtcagccctgcccctgaacctgttcatggtgcatcagaacataatgctgacaccggtgtcagtgtggcccgagcctgtgtcctccccacctcgcccaccctggcaaggacagctgcggccaaggacgaaagccctcccttggctggcctcacgatggggccgtcccgggagccaggtgggagctgccttccactgccatcgggtctcctctcctctcccacgcggctggccctacccaggcgccaccttcggtctcagtctggcaagacgctgggtcttcaggctccatgccaacagagcccctggtgcaatgcggtcacaggttttatgggactttggtgagctgggcggtcatggttttgaaataaatgtattttgttactttctgaaaaaaaaa

SEQ ID NO: 1190 - DNA, 2145 bp, human
aataaatggagtttcaaaatcacaagcttctttcccacatgaacataagactaggagcacatatggaagagtaaagttgaagggaatttggatgatgatttggcaagatgctgtaagtggattaggcaaggctgctaaagagagacaggaaatggctgtgttagtgcttcggacctccgttagaagtagcagttcatggtgttgaaggtttgttgttgaaaataccttcctgaggcacctcttcattgtgcttattcttcccacaacattgtgccaagacactgtcaagcctgggcctgtcaaagcctgggatgtcaaaggcctgggtctttctcatcctgctgtaatgtattgatagctgggggctctgcagaaggacaagggaaaggtgggatagtaacatctttttgagggaagaattggcttcctttcttgaaagtggtgaaggtacagcatatagctgcatggaagaaacagtaatcggatggctaccttctacattttgtattaggaaacaaagtccattgtaagagtccatgttgatcttggaaatagaaggattgaaaaaagctaaatttccacaaagaacaagaacttgaccatctcctttttgatctgaagactaggggacaatggatatcatagagacagcaaaacttgaagaacatttggaaaatcaacccagtgatcctacgaacacttatgcaagacccgctgaacctgttgaagaagaaaacaaaaatggcaatggtaaacccaagagcttatccagtgggctgcgaaaaggcaccaaaaagtacccggactatatccaaattgctatgcccactgaatcaaggaacaaatttccactagagtggtggaaaacgggcattgccttcatatatgcagttttcaacctcgtcttgacaaccgtcatgatcacagttgtacatgagagggtccctcccaaggagcttagccctccactcccagacaagttttttgattacattgatagggtgaaatgggcattttctgtatcagaaataaatgggattatattagttggattatggatcacccagtggctgtttctgagatacaagtcaatagtgggacgcagattctgttttattattggaactttatacctgtatcgctgcattacaatgtatgttactactctacctgtgcctggaatgcatttccagtgtgctccaaagctcaatggagactctcaggcaaaagttcaacggattctacgattgatttctggtggtggattgtccataactggatcacatatcttatgtggagacttcctcttcagcggtcacacggttacgctgacactgacttatttgttcatcaaagaatattcgcctcgtcacttctggtggtatcatttaatctgctggctgctgagtgctgccgggatcatctgcattcttgtagcacacgaacactacactatcgatgtgatcattgcttattatatcacaacacgactgttttggtggtaccattcaatggccaatgaaaagaacttgaaggtctcttcacagactaatttcttatctcgagcatggtggttccccatcttttatttttttgagaaaaatgtacaaggctcaattccttgctgcttctcctggccgctgtcttggcctcctggctgcttcaaatcatcatgcaaaaagtattcacgggttcagaagattggtgaagacaatgagaaatcgacctgaggagcaaaacaaaggcatcagctcttacaccaaaagagttaacgctgtaaccaaaggtatagttttgttttttattttaggagaactgactggtaaatgaagaaatggaccaaattttgtgtaaacgattagaaagatgaacaaagtattgccctttgactggttttcttcttcatcctgagaaagatacattctcttgcagctcttcattcattggtgacaagcccccaccccgggactttactaatgagcttgttaaagaggtgccaaagaacatattcctcctttctttattctttctccaccaaaaccctctacttcagaattttttcaggatatttttcagcccaaggtcagaagaatgtgttaatattttaaataaaatatctggacatctacaaaaaaaaaaaaaaaa

SEQ ID NO: 1191 - DNA, 2755 bp, human
gtgttgctcctcccctggcagccgtgaggggggttagatctcagccggagccggagctgggcctagctgtcccacgggccaccactacctcctttggttcgggagaaagctacgaccaagtacgcccagctcgggccttagaacttctgaacgggcagtgcgggtaggccctgcttagcccttcccggaggacacctgaccaaaagaggaagatagtcttgggacccttgcatggtgtttcaaagggtggtgaagaactaaggtagaagaatacatgttcacttccagtgaacaagagcatgttcccaaactcaattttgggtcacccacccttcactccaaatcatcaacaacataataacttctttaccctgtcacctactgtttattcacaccagcagcttatagatgcacaattcaactttcagaatgcagacttgtctagagctgtgtcattacagcagctgacatatggaaatgtcagtccaatacagacctcagcttccccattatttcgaggaaggaagagattaagcgatgaaaaaaaccttcctcttgacggtaaacggcaacgtttccattcaccccaccaagagccaactgtagttaaccagatagtgcctttatcaggtgaacgaagatactcaatgccaccattgtttcatacacattatgtaccagatatagtcagatgtgttccaccttttcgagaaattgcatttttagaacctagagaaatcacactgcctgaggccaaagataagttgagtcagcagatactggagttatttgaaacatgtcagcagcaaataagtgatttaaagaagaaagaactctgtcgaacacagctgcagagagaaattcagctgttatttccacaaagcagactttttttggttgggtcctctttaaatggatttggtacccggagcagtgatggtgatttatgcctagttgttaaggaagaaccatgtttttttcaggtaaatcagaagactgaagcacggcatatactcaccttagtccataaacacttctgtactagactttcgggctacattgagagacctcagctgattcgagcaaaagtgccaattgtgaagttcagggataaagtcagttgtgtggagtttgacttgaatgtaaacaatattgttggaataagaaacacattccttctcagaacttatgcataccttgaaaatcgagttcgtccgttagtgctggtgattaagaagtgggcaagtcaccatcagataaatgatgccagtcgtggtactttaagcagctatagtcttgtattgatggttttgcactatttacaaaccctacctgaacccatccttccatccctccaaaaaatttacccagagtcttttagtcctgctatacagctgcaccttgtacatcaagctccatgtaatgttcctccttacctctcaaagaatgaatcaaaccttggggacctcttactgggctttcttaaatattatgctacagaatttgactggaatagtcaaatgatttcagttcgtgaagccaaagccattccaaggcctgatggtattgaatggagaaataaatacatctgtgtagaagaaccttttgatggaacaaatacagccagagcagtgcacgaaaagcagaaatttgatatgatcaaggatcaatttttaaagtcatggcacagattgaaaaacaagagagatttgaacagtatactacctgtaagagctgctgtcctgaaaagataactggcctctatttcttaataaattcttccaagaaataaagaacaatagtttcatcataatacattatgtttacctccatcatagttgcttttttcatagttcttgttttcatgttttatttttaaaaagacatataaagattgcatattttattatgacatttcctaataaacccctttgatttaaaaatgtatttttaaaaatgtttacattgatgatgagtaatattgcatgtgttttcaggtgatcagataaaatatattttgggaaattaacaaataaaaagtttttgatataacttcaattaattgtaccacatgctaatcctgaagagatgtgtagaattttggaaagggtctaattcatacatgcttaaagtataacctacgttagatagtttgttgtcaaagtctgttctagtaaagtgaagattcaagtcagttgttcatttacttgaagcaaaacgaaatctttcatttcagtcaaatcactgcagtcatgaaatactgaacaattgccttaagtctttgcttgactcactgggatagactgaggctttgggtgtgtctgtattagcatttcattagtacttcacatgcttttgatgtactcttgagattgctttaaattttgtattgaaacaacaatacattttgcactgtagtaatgggagcactaactcttacaacagttagtgaatcgttttaaagaatcagttcagtgtagacattttgaaaagattgtttcctgtgctttacgatagcttagtgcaatgtgcacttctgttttacttgccattttcctgctctgttttctctgtgacatgaagcaacagaaactgagatcaaagttaagattatatcctgtttgtagtatcagatatttttctgtgtacaattataggattgtaatctaaactggaatttttaggcagtaagtcaccacaaaatgttttagataagacacaataaaattattataaataaaagcttaatgtttgt

SEQ ID NO: 1192 - DNA, 8962 bp, human
agtcttggggtccaaggctgagggagcgggacggaagtgagcgggtcccgccccttccccttctcgtctccgttggagtcgtctctgccgcggcttcctcggctgccagctctccggcgagccggagtcctagtgccgtaccgtcagtccccggccgcgcggagccgggatgcactgttcctgctgtgggtcctcatcatggagaccaaacgggtggagattcccggcagcgtcctggacgatctctgcagccgatttattttgcatattcccagcgaggaaagagacaatgcaatccgagtgtgttttcagattgaacttgcccattggttttacttggatttctacatgcagaacacaccaggattacctcagtgtgggataagagactttgctaaagctgtcttcagtcattgtccgtttttgctgcctcaaggtgaagatgtggaaaaagttttggatgaatggaaggaatataaaatgggagtaccaacatatggtgcaattattcttgatgagacacttgaaaatgtactactggttcaggggtacctagcaaaatcaggctggggatttccaaaaggaaaagtaaataaagaagaagctcctcatgattgtgctgctagagaggtctttgaagaaactggttttgatatcaaagactatatttgtaaggatgattacattgaacttcgaatcaatgaccagcttgctcgtttgtacatcattccaggaattccaaaagacacaaaatttaacccaaaaactagaagagaaattcggaacattgagtggttctctattgagaaattgccttgtcatagaaatgatatgacccccaaatccaaacttggtttggcacctaacaaattttttatggccattccctttatcagaccattaagggactggctttctcgaagatttggcgattcctcagacagtgacaatggattttcctcaactggtagcacgccggctaaacccactgtggaaaaattgagtcgaaccaaattccgccacagtcagcagttatttcctgacggttctcctggtgaccagtgggtaaagcacaggcaaccactgcagcaaaagccatataataatcattctgaaatgtctgaccttttaaaaggaaagaatcaaagtatgaggggaaatggcagaaaacagtatcaagattcacctaatcaaaagaaaagaacaaatgggcttcagccagcaaagcagcagaattctttgatgaagtgtgaaaagaaacttcatccacggaaacttcaggataattttgaaacagatgctgtatatgacttgcctagctccagtgaagaccagttgctagaacatgccgagggacagcccgtggcatgtaatggacattgcaagttccccttttcatccagagcctttttgagtttcaagtttgaccataatgctataatgaaaatcttggacctttgatagcagcacatgtattgtaaatgtcccaggatcagagacctgttgaatttgagtgggtgtctcctcaagccttacctttctcaggtgttttaaagaaatgcagggaggcaatgtttctgaagacattttctgtttataagagagtagaaagaaacacgagtttgcactgtaaatgcagttataaccttttatacagatttaccttttcagtgttcagtacaagtttaagttgctttctttgagggcatttattctgtgtgactgtgggttttattttgtattctggttaagaaaataatgtattgagttactgtcaagtagccaagttaatgggaatgctccatctacctgttacagtgattgcaataatagtatattggagtttttcaaagaaacttaaagtaatgcccaattattaaatgaacacaagagctgagatgtcacattcgtcagcattacaggtgatctattttggtggcattttgtacttctctctgcttctaaccactgaggctctctaatcttcctctggagttttagtgaaaggatttattgagcagcttctggaatataatgtgcatgtccaaaatgaactcagcgcttcaaaaggacaaagtctgtagcctggaggggcttgagtggatgggagctgatgctgtgattttgagctgtggttacatgcagtcagtaaacctgtgagactgctggaggaaatgtagcagacagcatggaggctgggacccagcagctactttgggtcatgtctttactgtcctgcctccaaccctttagtctcgtagacttttgttcttgtggaaatttcttctgtattccagttgtgtaaatatgtatggaaaactgatattactaggttttacgttgcatctccagtattgatctttggaaactgatgttacattaggttccaattcgcaatagtagcagagactgacatgcttttattgacctgctaagcccctggatgatggagcgagaagggaaggggtatgcagtttacccaagtccaaataaagcatttcactaggttacacgttatgtatatgtgttacataacagtaacatacataactcactcctaggaatgtattttgcttcaggatttttaaattcaaataaggatggcagtgcccattttaaggaggatttcagctataactgaggacaatcaccagggcgttaagggggctttagtgttttggctgcatctgacctcattgaaggaatttcttgggagtcgggggtgtttgagtatatgtgtgtgtgtgtaactatcatgtgggttttaaaaatccttttttacagtggtatccacaaaatacttctctgcttataaatgttattgtagaaatctttattctgtgtaggtagcctatttaattgggttccactgaacctcatgggacttttaaaagaagggctatttaaggaattcacttggtagtactttgctttagcttttaaatggcttgattttaaaggagaaattctatttattaatgaaagtgtcacccttttggtgctaagcaggagaattcacaattaaagcagtgtgtatagaattatgatattcagaatcctgcatcttttaatgtgacaaatttttgaatcctgtgacttttgctttttaatgcattatatgattgtgtttggaagcttttactgttcttttcagaaatacggctgctttgcttgggtctcttcgagccatatttatagttggtcccagcattccagacttctggtaaattgttaaaggagtgaaaatgtagtttgcctggcagatgaataattttcactcatttattgtcttctggaaaccatttaacttttactgttttttatttttttggtatgtgtttttttttttctttttaagtgcatactttggccagtcttcctggtgcctgtagagttggatttttcagctctcaatactgaagcaaaagagattatagttaccagaagtatggcctctaatggtgttgagccttttcaagaaccaacaaattatctttgtgattacagtagtttaactatggttaaatgttactgctgttgcgctgctttatttaatgcactgtggaacaaaatataagggtactgttggggtgtgattatgataacttcaggcttttagctctcctcaaagtttgaggttaaaaaaatgttaaaagatgtgagttaaagtttatgtgtgtgatgtgacttaactatgcagaaaatatttaagttggatgtacttgttttaggtacatctactatacttattctctcaaacctgggtaatagtttctcagtgttcaggttaccttgagaaaggccatgcttagcgaactggatttctcctttgagaaattttagtatggtttgaggaaatcaagtgataaaggagtatgctgaatatgcaatcatttacttctactgagtgctgcattttaagatgctagatgagaagagtagttggttttgcttcattatgttttatgtctttgagagagatacaggtcttggaattcactttttaaatgttacgttccaaccttatatgttccaaggtgcagtgcactgtgaatcttttatttttaaaaaaatttgtaggtgcttttatgtataactttaatgatttataagatgctaaatgaattgtttttgtacctaaccattgtaatccaaaagataagggtgtggtttacatgcttttcaaaaatttttgttaagaagtagcaaatgaatggtttaggatttcaaatagtgataccctcctgagacatgagcatttggagaggcctgagaacctaatagaactcatatagtgtgagtgaaatttgattaaagatgttggaaaatgaagttggatttttgtattcatgtataaaggaaagtctcccagtgctgtcaaaggaattgtggttactacttgctgttctgagctttgaatatcgttatttttctattaaatatcaattagtaagtatagctaatgaagacatataatgaaagtaattttatgctgtaagattgaattggtacttttccttattaaggctttagtaatttgtatgtaatgtcaaataaaaggaattcaaatctgagtaaataacagcctcctactataggaattagattcttctataaaagtcaccatattgtatcctatagaaaagttaaggtctgagtgcatgtgtgcattaaaaacatttcactacctattctctcatggacttctcatcctttcttttttcatctccaacagttaaatggtaaggagagcaaagttaattataaaaattagacattttgccaagttagttttcttaccacaataccctcttggctttttttttttttttttgagatggagtttcactcctgttgcccaggctggagtgcaatggtgcaatttcggctcaccgcaacctacgcctcccgggttcaagtgattctcctgcctcagcctcccaagtagctgggattacaggcatgcgccaccacgccctgctaattctgtctttttagtagagacggggtttctccatgttggtcggggtggtctctcttggctttttatctttatttttgtaccagtggaccttcctgctccctgagactgttttgattgacatcttttgtgtttctatattttccgaggcagtattttctttgtatgttaatcatagttatagtaaagtcagactcattaacttttcttcctagtaattttgacttggattattttctagcctgggggatggggttcatatgtgttgttgtaactttagattactaaacaaaacaaactgtttttttgtttgaaggtatcctttacatacctgtctgtaggtaagcaagtgttagtaaaaacaattttgtcaaacagtactcctgacagcttggtaaagtctaggtagagtttctgattttgtattatgtcctaagacttgaaagtgcatttgtctagttgccaaaagttctaaaaatgagatggtgggctttctcagcatctttttgcttcctagaattgagttgctcttgaagtctgtactcctgtgtcagaaagatggcagactgcaaatgggcagtacaggctttgccccatgctttcaaagtaggattctggattgcagtttcaaaaaaatatgatagattattgttatagaatcaaagtgtcctgaagggagaagaatagctatagttgctgggcaaagagtgtaagaaagaaactttagagcatttatcaatacttgagtgctttattatgttccaggctagaaatgtgatcattgcatggcctaagtgtagtcattcatatatatatgaatatctatatctatatctatacatatatatgtatcgccattatcgagtgttttctagccctggataaagttaatttttttgaagtttgattgccaagcaatccagtgaatctaaagtaatttttctcactttaaagaccagtgatgaggagtctggtccttcctgtactgatactgtagaactccagtcaaacttcagtgcactgctttcttacaggaagacaactcagaacacacagccataatctgctttggtgtcagtcacatcacagtggttatacatttgtcctgaatggtgattcattcctttccatctaacttccttgtgacaaatagcatttactattgaaatagtcttaaaatagggaaaagagtgaaagttactcttatgcatgggagtgggcttaaagggttgacttccaccagctgagtacaaacaagtgtaaagaaaaactatgataaagtatggaggtcttgagaattgttcataatgaaatctttaatctgggttatcagagtaatgaaatcaccaataaaaacattccatttatcttggatcttctgtggttagcagaggagtatggtctagctatgttagcagcttgaaggcacaacgtaaaaggaatgagctttcacaaggtgcttacgttagctgggtagtattggtcaaaggtactctgaagagtgaatgcagaaatcagttggctgtgtttgtaatcttgtcccacatggaccctaacctttagtagacttcagtcttttagtccagtagaagacaatggccctgaatatgtgttttctgctttttggtggaaggtttcctgcaggtggttgggtggtttttgggttattggctactgttcgttcagtgccatttgaagacctgttgtttcttaatcctttttcttggtgtgactggccaggaaaaagtccattgagtcctttttttctccctggtgtcttaccccttctgtagaataatccatattttaaaatttgtttcacatctttatagcaaacctgccacagacttgcaagcagtgattttatctttccttcctgagaaggtgatctcacttttgatgtttgggtcacctgtggacacctgtgctcttttgagtctcaaggcttatagctttcacattggcttgggaacaacagacttgtgtgtggttctagagtgaaatgggcagtgttctgctggtcctcagtctttgagaggtcttaggcaacatccttagtatagtggaatttctgaggtcaaatttaacatttaatatattctccttttagttcattgaatctgaggttctaaatctgtagcttcattttgagcacaagtctgcattgtcattttttaagagattggcaggcatatgcttttgtgatacttaggaaaagactatggatggcagcaaatgaaagtaaaggttctcaactgtgaatgaaatttagaaagataattcttcagcagttggttgattagatgggttagtgcttttggaatatataacagtagacttgtattctttatgcactatacatatgatacgcactgacagaaaagcacagaagacatactgctaagagtttctttgtgcatttcactactgttctaggggactgctgtctctttggttccttttaggtttgtgttaggatgttgcacaagtaatcatttaatgttaaatgcaagtgtccaaagaaatgagtcttaaagttctttggtcatatttcactttagagttaggacaggagacagctaacctgacttccattttacaaatattagaaactttttcttcagtaacaaaaacagggaaggacaataaaaccatgaactattttgctttatgtctgtttttaaaaaataattgttttgaagtttgcttattagcttaataccttatagtacttttaaaaaatcatccttggtaattattgacttatcctagatccatgtacaattcagacttttatctgttagctttaataaaaatttaaaaccatctcatttcagaataaaataaacggaattacagttcatgcattagcatttttaagtgaagttctcttaataagattgccttttgtctaaccgaaatagggcatacagattagtttggatgggaaagtggtaagacttgagtttttaatactgtgcctatttccaaaagaagacttgatgtggctttttacattatgctttaaagatgttaatggaggatacatagtcttaaaacaatttgtttgggagtaagttttagtcggaaaaaggtgaagatatttatgctgagttatgttaagcaaattattttgagaccttttgctggtagacaaaaactgaggaaatgtttcactaaatatattatggtcaatgaaaaaaccggactttagagtaaatgtgataaccaagtagatttgtgaactttatttctttagtaattatttttatcttatgtgaaatgattcaacctttaatttttgcctagattatagcaatgttttgttttaccttatagggcattttaatgcttggagaaagactaagtgaatctacttcaagggattctgttcatggtggtatacagttcttggtgctcttttggaaattgtcaaacatttactgatagcagaaaaggaaccccaaaacacctgtagtgttcaccttgttataagaacagaaacatttggaacaggtttcattctgtttctagatttatgttgttgtagttgaacagcaactgtttttttccctcagtgttaacgaaaggataaagactacctgtattgttgggtatgaccatcaaaggatttccggtgattcatgtttgtgaattggagtttaaatgtttgcaggattactgtacttccaaagacccactagaatgtcagctgtactctgtactctccactgagaaaatgaacaaaatcctatgtcttaacagttatgctctaactttttgaaagctttttgatgtaaataataggttagaaactaaaagccttttaatcttacaaaatacaatttgaacgatggaaggttgttcagatactggctttctgtaaaaacatcattgtgttagattgtttgtaatgtactatcaataaaattggctgcttgggcagttttagttaccaccttaaaaaaaaaaaaaaaaaaa

SEQ ID NO: 1193 - DNA, 2584 bp, human
ggggtgcggggcgcagcattgtgcggtcatggtgggccagatgtactgctaccccggcagccacctggcccgggcgctgacgcgggcgctggcgctggccctggtgctggccctgctggtcgggccgttcctgagcggcctggcgggggcgatcccagcgccggggggccgctgggcgcgcgatgggcaggtccctccagcctcccgcagccgctcggtgctcctggacgtctcggcgggccagctgcttatggtggacggacgccaccctgacgccgtggcctgggccaacctcaccaacgccatccgcgagactgggtgggccttcctggagctgggcacaagtggccaatacaatgacagcttgcaggcctatgcagccggtgtggtggaggctgctgtgtcggaggagctcatctacatgcactggatgaacacggtggtgaattactgcggccccttcgagtatgaagtcggctactgcgagaggctgaagagcttcctggaggccaacctagagtggatgcaggaagagatggagtcaaacccagactcaccttactggcaccaggtgcggctgaccctcctgcagctgaaaggcctggaggacagctacgaaggccgtgtgagcttcccagctgggaagttcaccatcaaacccttggggttcctcctgctgcagctctctggggacctggaagacctggagctggccctgaacaagaccaagatcaaaccttctctgggctctggctcctgttctgccctcatcaagctgctccctggccagagtgacctcctggttgcccacaacacctggaacaactaccagcacatgctgcgtgtcatcaagaagtactggctccagttccgggaaggcccctggggggactacccgctggttcccggcaacaagctggtcttctcctcctaccccggcaccatcttctcctgcgacgacttctacatcctgggcagtgggctggtgacactggagaccaccattggcaacaagaacccagccctgtggaagtatgtgcggcccaggggctgtgtgctggagtgggtacgcaacatcgtggccaaccgcctggcctcggatggggccacctgggcagacatcttcaagaggttcaacagcggcacgtataacaaccagtggatgatcgtggactacaaggcgttcatcccgggtgggcccagccccgggagccgggtgcttaccatcctggagcagatccccggcatggtggtggtggctgacaagacctcggagctctaccagaagacctactgggccagctacaacataccgtccttcgagactgtgttcaatgccagtgggctgcaggccctagtggcccagtatggggactggttttcttatgacgggagcccccgggcccagatcttccggcggaaccagtcactggtacaagacatggactccatggtcaggctgatgaggtacaatgacttcctccatgaccctctgtcactgtgcaaagcctgcaacccccagcccaatggggagaatgctatctccgcccgctccgacctcaacccggccaatggctcctaccccttcaaggccctgcgtcagcgctcccatgggggtatcgatgtgaaggtgaccagcatgtcactggccaggatcctgagcctgctggcggccagcggtcccacgtgggaccaggtgcccccgttccagtggagcacctcgcccttcagcggcctgctgcacatgggccagccagacctctggaagttcgcgcctgtcaaggtttcatgggactgaagttctgtccctgctctgctgctttcgcccctgctgaccctcgtcagggtcacccccgtcccaaggccaccggacttctaactccagcccctcctgggggcttcgttctctgatctggggtctgagtcatctcctcctagagtgggtcacgaacctgatggggctcagaactgaccccctctctcccccgaggtgggtgggcaccgtggcgtctcttctgccctgccctaaatctcccactctctgtttctgtctgtttcctactgctgctctctcaacctcattcccacctctggggccccttcctcgtgcttctccttcctgagggtttgggaaggtcctggggcagactctggggctcccatggggtggaaggagcctgttccagcacccttctcccagctgcattcccacgggtggccctggagctggtgagctttgtctgggcgttgtcttcggctggcattgctcctcccagctctggcccctctgctccctcaggaagcagtcccctcgtctccctttctgggcagcttccttgaggacagaaacttgaaaacaaacacaaaccaaagtttctggccatctgtggctggagggttctgaatgtcctctctccatgtcaggcagagggtcagcccccatgcttctgcctcaggccccaccccaccccaccccaggcctgcccctcacctcagggccatacccacagcgccctgatggaggaaccagaccgcaggctgtgccaccattaaacaagagcggctgtgaaaaaaaaaaaaaaaa

SEQ ID NO: 1194 - DNA, 5821 bp, human
tgaggtccggaagcggctgccgggcagcaaaggaggatggcgaggggctgatactgaacccgggaagggtgggctgtgctgaagccagagccggagccggagctggggccagaacccgagcagtgagttcctccactggctgccggctggcggcgctcgccgccttgggcaggacccacctcgccttcctcccggcgtggcagatgctccagctgccatgtccacgcagagacttcggaatgaagactaccacgactacagctccacggacgtgagccctgaggagagcccgtcggaaggcctcaacaacctctcctccccgggctcctaccagcgctttggtcaaagcaatagcacaacatggttccagaccttgatccacctgttaaaaggcaacattggcacaggactcctgggactccctctggcggtgaaaaatgcaggcatcgtgatgggtcccatcagcctgctgatcataggcatcgtggccgtgcactgcatgggtatcctggtgaaatgtgctcaccacttctgccgcaggctgaataaatcctttgtggattatggtgatactgtgatgtatggactagaatccagcccctgctcctggctccggaaccacgcacactggggaagacgtgttgtggacttcttcctgattgtcacccagctgggattctgctgtgtctattttgtgtttctggctgacaactttaaacaggtgatagaagcggccaatgggaccaccaataactgccacaacaatgagacggtgattctgacgcctaccatggactcgcgactctacatgctctccttcctgcccttcctggtgctgctggttttcatcaggaacctccgagccctgtccatcttctccctgttggccaacatcaccatgctggtcagcttggtcatgatctaccagttcattgttcagaggatcccagaccccagccacctccccttggtggccccttggaagacctaccctctcttctttggcacagcgattttttcatttgaaggcattggaatggttctgcccctggaaaacaaaatgaaggatcctcggaagttcccactcatcctgtacctgggcatggtcatcgtcaccatcctctacatcagcctggggtgtctggggtacctgcaatttggagctaatatccaaggcagcataaccctcaacctgcccaactgctggttgtaccagtcagttaagctgctgtactccatcgggatctttttcacctacgcactccagttctacgtcccggctgagatcatcatccccttctttgtgtcccgagcgcccgagcactgtgagttagtggtggacctgtttgtgcgcacagtgctggtctgcctgacatgcatcttggccatcctcatcccccgcctggacctggtcatctccctggtgggctccgtgagcagcagcgccctggccctcatcatcccaccgctcctggaggtcaccaccttctactcagagggcatgagccccctcaccatctttaaggacgccctgatcagcatcctgggcttcgtgggctttgtggtggggacctatgaggctctctatgagctgatccagccaagcaatgctcccatcttcatcaattccacctgtgccttcatatagggatctgggttcgtctctgcagctgcctacccctgccccatgtgtcccccgttacctgtcctcagagcctcaggtatggtccaggctctgaggaaagtcagggttgctgtgtgggaacccctctgcctggcacctggataccctgggccaggtaacctgagggcaggggagaggtggggtggcagacacgcagaagtgctactagtgacagggctgccatcgctcacctgtacctatttacacccagaactttccagctccccctcatcatgcctcctccttcctacctgcctcccctctgctggtgcacctcgcccaactcattcttactgcacagttcactttatttaacaattttcatgtcccccacctcatgttttcaccttttctgggccaggcatagattaagtaactgggaacgccccctctttataaagctgggcttctttctcatctctctcccaaatgttgtatctcagtattcttcctattcgagtctccagggggtggctggacctacctggtcatttgaaacaggcccccaagctggagtttttaatctggactctctggcttgctgtgacccctaaggcaatgcttctcttccctggattccttagtgtgggtcacagtactgtgttcttagttgctttagctcttaaaacatacgaagtgttgcctaaactgaaaatatttatcttttatttaaaatcagatttttgtttttagactgtcttagatctggggctattacgaatcacttcttcttcagtaaactttgactcaacttctcctgctgaaaagaagctcgctccagatgtctgcatgggtcctcggcactcttggctgaggactcaaaggttttaatcaggatcgtctaaaaatgtacctcggtgaggaggcacagattttgcctcctgttgaccagcctggtttcataccgaaaagacattgaaggactgcagaaatgtatgggtgcaccgggccgagggaagggtggctgagtgagaggcgtataaaatggggctgtgtgcatgcaggcccatgtttcagcctcagcccacgccaggtgaaaggatcagcaatgctctgttgccatcgtgctgggacgacaccagctctattgccaccgatgagtagctgaggtcagtgtgcacagagtttgaaattaagttaatagactttacagcagctggtctgacactacgcgcagtgctcggttgtttacaatcagtggggaaaagggcagaaccagtgcccggccccacactgcctctgtggcctggactttgaaaggaacccactgaacactaattatgagccctgtctttcccccagaatgcctccctgggtttcacaaacagccttgaggttggccctcctcaaggtcagccttcagatttgggagcaaacttcagagaaggcagaggaagatacattgccttgctgtgggctgcctcttctttcctcttggtgtgcgaagtatttcagaaggccattgatgaattccccctctttagctgtgtatttgtgcacgtgtgtgtgtacgtgcgtgtgtgtgtgtgttcctgtgtaagtaacagaccagactccttttctcttctgtcccgtcaccaggctcttgcttcactgcagatacagttcactctgaaagctggttgaaggagagcagcaaaaatgtatcaggggttttgcttctgtgtttcgccaaagctcataagggctgtgacccacccatatggccccagttttttctgtctcttctgttccaaagccaggagagctgacttccaggtgaagggatgggaaaagtggactctcattgtagtgactcccaacctacctaataatttgttaacttaggaatatgctatcattgttgacttgttcttccttaggagaaggacgattttcacccaccctttctgttctatggtggactcttaacaggtgctatgtgaccaggaatctagccgggagtagcagaggccctgtcttctgaagtctcaggcttagaagttaccaaagtgggctcagaaactgtcatctcctggttccaagttcgggctctggcagcccagccgctatcttagctgtctttcccagcggtgctaagagtggtctcagtgagaaggtagatgccaactggagggccagacctgtgtcctgcccatgtcctccttggtggacgtttctgtttactcagagctgctagagaccatcctgcccatccgagttctgagattgggactgtgatgttgggacctgaggactggatggtagaatactggggtcccccagctcttagcaggatgcaggctattgcttccacacccctggccgtgagaacgtggtatgtaggagagttggctgtagctttaggatttctggaagccaatttggcatggcctatttgatctctggcttgtgctcctgctacactgacagactgattgcgtggctctttcagaagacccaggaagggcagctccagccagaggaccttcctggctatgcaggtgcacagctcttaggcatcaagcaaagggtcagccagtcagtagtagtgggaggaagcccttcctcctcttatgcaagcagctcgcagccagcccagaatctcttatgcagcccaaagggcttcttgaggtagagagccctccccagtgtcttcccaggataagtagaaatatgatcacagagcaacggagcaaaggctttcgggagtgtgaggctgcatctgctggagcaaagggaaaccgtgggcttttccggccagatactcttgagctctgtgaccctgctcctgtcaccccaatttctccaagccagaggtagctttctcagagccccttggtggttctgtcctccaaatgctgctgttgggagcgggcttccagctctcagtgggcagtgcacctcctcctaaatgcaggcacttgctaggaagagtgtgagctggcgtcttctgttcaccctgcctagcagttgtcaccattcacaagtggcattatttatgttgtgctgctgtccagctgctaagatcccttcatctgcacaagccctggctagatatgtgtgaatgtgtggcatcatttcacttcagccgcccaattccatctctcctctgcagccagattcactggctgatgctcactgctcactgtctatccccacgaaatttagttttatcagtagtcttaaagtgttgatctcaaacaagtacattagaaaaatcatgtttcttctctctcatcttactttttcttctcagatttctcccttcctagaacattctctctgtttagcactaatgttcacctcgtattttttggaagtgcaaaaatctcaatttgtgtctgtttacagctctctctcctcactgctcacagcaaggggttctgtatcagtggatttcattttgtagctgctgagatgttaaggcaagcctcagcatctgcccctgctgggtgcacaatgctgcttcctcgaagagaagacacagagtccaagtggcaggacttgaggttggcttccactctgccttagaagttaattttccaaagtacattacaaatctctgaggccattaggggaaaaggaaggggtgtggtttgtctttgaaattacggttaatacttttagacagtaagtccggctggttgcagggctatttgccccgacagcatcagcctgtaacatttcttctctttcctttgtgccactgagtcgttccctggccagaggacataaatggtgctggtaggaggttatcagagtaaggaaggtagcagatataggtgcagggtgcctgtcattcactgtgttatttggtttaaatcaaagtgattctgggggaagctatgctctttcagtggataataaaattggtaactctattgtaaaacatgtcaatggtgtgtgaagaaaaatcaaccaatctgtaggtgttgataactagacagtactgtgtatgttacgtgcctgtgtggatgtgcacttccagcatggtatgtgtagcgatgtggatcatgccagagttcgtagatcctgttttggggtttgcacatggatcgtatgttaagctttttcttttcaataaatgaattttatttttatttttgaaaaaaaaaaaaaaaaaaaaaaaaaaaaaaaaaaaaaaaaaaaaaaaaa

SEQ ID NO: 1195 - DNA, 3318 bp, human
gactgctaagagggggttaaagggggacgatgtgaaggagagaacctgtggtccttcagaaggcgaagaagaaagaaaggggaagcagtgaagaaagggacggagatactgggacagggagaaaaaagttgtggagagtagcttttaaggagtcatttggtggccatggatccaacgtgctcttctgagtgcatttataacctcatacccagtgacttgaaggagcctccccagcctcctaggtacatatccatttttaaggcaactgtaaaagatgacatgcaaaaagctaaaactgcaatgaaaactatgggaccagcaaaagttgaagtaccttctccaaaggatttcctaaagaaacattcaaaggagaaaactctaccacccaaaaaaaactttgatcggaacgtgcccaaaaagcctgctgtgccattgaagactgatcatcctgtcatgggaatacagagtggaaaaaattttataaatacaaatgcagctgatatcatcatgggagtggctaaaaagcctaaaccaatttatgttgataaaagaactggagacaagcatgatcttgagccttcaggactagttccaaagtacatcaataaaaaggattatggtgtcacacctgaatacatatgtaagcgaaacgaggaaataaagaaagcccaagaagactatgatcgttatatccaggaaaaccttaagaaagcagctatgaaaaggctctccgatgaagaaagggaggcagttttgcaggggctgaaaaagaactgggaagaggtgcataaagaattccagtccctctcggtctttatagattctataccaaagaagatccgcaagcagaggctggaagaagaaatgaaacaactagaacacgacattggcataattgaaaagcacaagattatttatattgccaataacgcatgataccaacagcacaactttgaaaactgttaagtattttgaactggaaatagtaacacgtgccttcttgctactctaaactgtctccaacacattgtttctgagctccacaaatgcaaaagatgtattttcctgtggcccatgacatttgcagttattcccagtgagaaatattttcagtattcgtaacactgtatatgatgaaaggcttctatttggaggaagaaaaattaagaagacaacttacaaaatcaagatgacaacttataaaggcatcattgaggatgattaaggagaatagcctcctttctagcataccaacctcgatactcttattttattccacaactcactatgcatatcttatttaaatgtttttttccttttggtcctttctacttatctattttgtgaattctaaagttacatttgtaagattacataatctattaagcaataagtttatgttagtagagctgttttcaacccaaaaataagaaaaaatagctctaaatatctaaaaggaaaaggttattttatgaaattttaaattagaaaaatttggtaaaatatatgcaactataaaatatcagagaaataacaatttctactgcttacactggtttttatcctctggacaacataaaaaacaaaatatgggagtctttcaggcttttttcacaaacacagaatttggaagccttatagaaaagcttattttggttacttaaagaaaagtagtttatatacaattattttttgaaaattcacttgaaacttgtccatatgagtatctttattcctttattaacttagggcagatataaaataaaggataatatatgacaaattctcacttaccaagaatggttggttgctatttagggtaggctaacagctgtgacagtacactccaaaatgtataattacgtaaacacatattcaattcttgctaacatagcagtactttgctgtgagcaggtcagcaggaacccttttctgcagtcactcagggacccagacttacagagtgggtaggatgcatctgatccagagttagggagaggcacgtacaggccaggcctagaaatgatgcatatcattcccgtttgcatcgctaagtaagcaacttaagttgctttaacaaactaactccaaatctcagtttcctgataaagatacatttttcatttacatcactgtgcaatgtgactaagggtaggggtataagtctgttccatgcagtcactcagggacccagtctccttttgtctggtgactctgttgatccaggcagtctttctctgccaattcaggatgagatgtttaggtaagtattttatttgtgaaatgattgctatacatactcatttttaaataattcaaaatcagtagcaatgcaaaaatattctgattactttagccttatggatattatgctttgaagtcatgagtgggagttgccttaaatgttaaaatgaaaactttgtggttttaacagctaattcttttgctttctgtaaatgtctactaaagaatctagacttttctctatggtctacagtgttgtcctagatgaacattgttgcctttctttcacagagccttcagagggaaacattcccatccattgttcctggaaaggtgatccctaccacgggatcccaaacttggatagagccagttcaacctcccccaatccatacacatacatacctaggtcatcctatcacccaaaagagggacaaacatctgacttggacagctgaccagtgactgatcagattctctctctcttgagagcatgaattaagagacatggagactgcagtcacttgggagtagacacctgaaactaaaaagtcaaacttcattatgcagctagtttgacttggtttctcttcctgttcaaaggaagaatgggtagaataaagatttgatgtggtctggccccttgtctatgatctttttagcttgatttcttgaaatgctgcttcttccctacccactgtaactggcattcccatagtactgaggtactagagacctctgagatctgcacacatggttccctccacccagaaaactgcccttttctttctctcatcctacatagctgcctggcaaatccctagtcttcatcagctcacatcacatttccatgacaatcccctttgattcctcagaatctggccttcctttatagcactggtcatattgtattgtgcatatctggttatttgcctgttttccatgaacatttcaagcttatgggggagaagacactgtatacattttcatctgcattccttagaatctgcataacagctggtatagagaaggtactcaaaaaatccttaatgaataaagtaatggatcgtaccc

SEQ ID NO: 1196 - DNA, 1754 bp, human
aggagagatgtgagcctcgtaccaggaagatcatactgaggccaccaggttgagagccgcctggctggggggcttgtccggggacagcaggggcagaggcatggaggttcacagccaggaaatcgtgcagtgaacctgtcccctccggtcacaacatcaagagctgaactgggactagaagtcatcgccccagagctttttgctaccagaactgccgggtgaaaatctttggaagagaagtttgagaacctgttaaacaagctctctaggtaattctgtgcacgttcagtctgagaactgctgcatctgaagagatttgaacatggaattcaatccttcagatcatcctcgggccagcacaatattcctcagtaaatctcagacggacgtgagagaaaaacgcaagagtctcttcattaaccatcatcctccaggacaaatagcaaggaaatacagttcctgctccaccattttcctagatgatagcacagtcagtcaaccaaacctcaagtatacaattaaatgtgtcgctcttgcaatatattatcacatcaaaaacagggacccagatggaaggatgctcttagatatttttgatgaaaatcttcaccctctttcgaaatccgaagtgccaccagattatgacaaacacaacccagagcagaagcagatttaccggttcgttcggacactgttcagtgctgctcagctgacggctgaatgtgccgtcgtcaccctggtgtaccttgaaagacttttaacatacgcagagatagatatctgtccggccaactggaagcggattgttttaggggcgatcctgctggcctccaaggtgtgggatgaccaggctgtatggaatgtggattactgccagatcctgaaagacatcacggtggaggacatgagcgagctagagcgacagtttcttgaattgctgcagttcaacatcaatgttccttccagtgtctatgccaagtattattttgatcttcgttctctggcagaagcgaacaacctgagctttcccttggagcccctgagcagggagagggctcacaagcttgaggccatctctcgcctctgcgaggacaagtacaaggacctaagaagatccgcgaggaagcgctcagccagtgcagacaacctgactctgccccggtggtccccagccatcatctcttaactacggaggcccgccggaggccacaccatcccttagtttctcctttagtttgagaaaagacagacttggggtgggtttgtttttgttttttctttccttttctttttttacgcatagctccgtcaagctgcctggatgagcgcccatgcagcaaggcttggaggaagcgtcagtgccctggagatcccagctcgctctccccactgtcagcaacagcacttccttcgtggaggaagtggactcgaatcctggaggaggaaataaagggaaagggaagtcgtggagaggcagggaaaatggttaagcagcccggccctctggagtccccatgggggcggtagctgaagttggcgagcgcagcggtggatgcagagctggctgcacccagggctgggccagtgtgtcctgtaagacttcttgcattccttctgctgcttttttgggatgggggtatttttgttcatttgtttttgccctgttttgattttggtcccacagagcaggggatgtagtttgtacccaccatggcgcagacttccaaataaatagtactggtcatttctctctg

SEQ ID NO: 1197 - DNA, 3599 bp, human
gggggactacgggtcggcgttgggctcagtgggctcgaaacaaagggctgtccggtggggattcgtcgcggcgccttctgagtggtcgggtcgaggcttctcggcctagcagtgccctcgctgcgcgatctcaggcgggttctcctcggctccgcgcagcccgcgccgcggtgggggacccggcgcagcggcacctgctgccgagggaccccgcggcccgccccggtgctcgtgatggggctgatcttcgccaaactgtggagcctcttctgtaaccaagaacacaaagtaattatagtgggactggataatgcagggaaaaccaccattctttaccaattcttaatgaatgaagtggttcatacttctccaaccataggaagcaatgttgaagaaatagttgtgaagaacactcattttcttatgtgggatattggtggtcaggagtctctgcgatcatcctggaacacatattactcaaatacagagttcatcattcttgttgttgatagcattgacagggaacgactagctattacaaaagaagaattatacagaatgttggctcatgaggatttacggaaggctgcagtccttatctttgcaaataaacaggatatgaaagggtgtatgacagcagctgaaatctcgaaatacctcacccttagttcaattaaggatcatccatggcacattcaatcctgctgtgctctcacaggagaagggttatgccaaggtctagagtggatgacctcccggattggtgtgagataacttttttgcttgaaagagactgctctatttattctgtgacatgaacattttttcctagtacctttggctgctaaggcagcagcatgtttaatttataacaacacaaacctctgagagcaacacttgaatcaagtgcagctgaactggaacataaaagattttttcttaactttttttttttaacacactaatcttcagttggatgaatgtaatgtataactatgttttcagcaacaattcttctgtttattctaattaatcagtgactgccttgtaagaaatgtttgtcatatgcgtgatgtcttctgaaatattcttataaccttaatgaccaattgctttcaattcttgaccagcactccctcccaaccagagaattactggtttgatagagtagtcttggaaagcatcaggtactgcctgcagacttctccagcactaaatatatttgttccctctataaaccattcatctttcggacagaacttactgtaaagaaagaaatctgcctagaggatatatgtaaggaagattccacatcatgagtacttgccttttaactttcccccacattactgttgagtcatggaataatgtttaagttgttatttgcatggaaattaagtaggctgtttatttatctaaaggaatcaagtccactcttctgcctgcaacatttgttcaaaaactaaccaaggtaaaatatttatttgaaagcccaactttgatgttaaatattcttgaataaatctgttattttaagaatatcacattattcaatgcatataaaactatcagaagttagtaaatcataccagcactaaaaataagacaattggaatatattttagcatcagtttacaaacaactttattatcaacagaaattttagctcttttctttgcaagatatatcacagctgctttgggcagtagctgaagccgaagtatgaacagtccattttgtttcttaaaatttgaagtcgtgtctgtcatagcatttttactaccagcagtatgttacttaaaaaactacatggctttccttgaatttatttgacggtattatgtaatagacttgaaacaattgccatctttgtagttatgccttgggttctaaaatgttataggaaactgctgaattgaatcctagcttttagaatattaataggagactcaaagttaatattcttaacaacttaaaattaaaaaaagtcataatctatcaaaagtttatttattggatggcattaaaacatttttgaggcagttgtctaatatgaacaataatctaaacaatatattccttaaattaagaggaaagacaagtgtcgtatttcgattctgtttattcaaatgtgtgattttgctgaaatgaaagggataaaatgaatacttagagaataatacttcatttttgcagtactttttaattttgataaaaaagatacaaagttcataatatcaaaatatgtgttcaaaattggtattttaattttaatatttttgtaagttgatttaaattttgctcttttttcaggtgtgcttggtttattatatttagtcaagttaatttagtcgaatgtggtaacatttttctgatttatctttagttggagcacacccttgaactgaacagtggccaaaggaaagctttctgggctttggaaagtagttgtttaactttgttttaagccgttttcttagtgattctgtatcaagtagaggataagtgtagtttaacttagtttttaatataacccataatcaagaacatgagcgaaaagcagacataaatcgatatggatggtttgtggtgtgtgtgggatgtgggggaattaagaaaatgccatttacctaagcacagtttgcctgaatttctgcttggttgtgttgtttaccgtaagtactgagggtagtttccctaagtctgtcctgagaaaaagcatacttagtactcctgtatttgttcttatgaaatgactatctgccttcttgtatctagtaagattggctggctcaattttcttctgtcaaattatatggttattttttatattaccacatcagcattatattaaaagtgtttttaatagttgattgtattttgccaactactagtatagactcaaatttgctatttaatttttaaaatacaatttattttgtaaatcctttaaaaaatatttggttagttttggattagaaatgatttatgttagccatgtgttgaagatgaaattggcatcagtgtagacggtgctgattgggaaaagttcatgattaggaaattcatgtaagactttttaagagtattttttaggttttcactcaatctttcctgttacagtaacgtgaaaactgattattctttactccaagagaatgttttaacccaagcaagtatctaatactagagcattggttctgacattcattgtaaatcagtgaactgtaagatactgtctaaaaaatgtacatttgtaattagtgcctttattcatattttgaaataagttcttagttttatattatacctgttctttagaagtcatgttagcagctaattatttcagtgatgaaataatttgtgttttatatcccccttcacctccatgtattggttagcacagtttatagtaagtgaaaagcaagggacccacctacattaccttcaggagactgttctaccttttaatttgaaaacaaggaaattaaattttaacagaaatcttttaagtatgttataaccaaagtgttcaattatccttgcaagttcaaatacagcatttttctaaaaaaaaaaaaaaaaaaaaaaaaaaaaaa

SEQ ID NO: 1198 - DNA, 3485 bp, human
gcgggccacgtgcgggaggaggggccgccttctggttggcgcccggtgtccgttcctcctatcggcgtaggccccgcgaggaagacaagggcgcgccctggctgggagggcgtggccagagacctgtccatcaccgagtccacgagtggcagcacctaccacaccgcagtaccttggcgaggcggagcaggggcaggcaggtcgcggaagggggaggcggagcaaggccggcgggagccaatcggcctggcggcacgagggggcgggggcggggtcaacgcgcgcgacccaaacacacgggccgggcgcaccctgcagccgcgccgctccgcggccttccggcgcggggccggggaacctcctccccatctgcgcaccccccgccttcgcggcccagatcctcccgccagcccggcccctccttcgcagggggagcgaggcgacggttgccgggaagcgcgcgccacctctccctcccatttttcgttctcccctcgcgcgccacccgtttttcctctttctccgttaataacagctgggtggctgggggaggagggaaggtggccccggcggagtctgggcgggcgcctcccactcagccgccagccgccgtgggagccggaggatggcggcggtagcagcggccgcccgagaggaggcggtgccgagatcgggggcgccgagcgcggcagcagagagcggtagcggcccgtcgtggcgcaccagaaccgaaaccagcggcagccgcacggccacttgagccgccccttcctgctggagccagcgaggggtgcctgcagccgggaccccttcctctccgcgtctcctcgtctcccgcgcccgcgtcaggccgtcggcctcgcccgccgccccaagaagagcgcgccgggcgccgactgcccctctggacgccgggcggcggccctggacgtgcgggggcctctctgggccggccgcggcgcctgggccctgccctctagctcccgcgctcgctcccgccctcccggctctcggggcgcagcgcgcgggcccggcccggggcagggcggacatgggcgccaaacagagcggcccggccgccgctaacggccgcacgcgcgcgtactcgggctcggatctaccttccagtagcagcggaggcgccaatgggaccgcgggcggcggcgggggcgctcgggccgccgccgcggggaggttcccggctcaggtgcccagcgcgcaccagcccagcgcctccggcggcgccgcggcggccgcggcggccccggcagccccggcggccccgcgcagccgctccctcggcggggccgtggggagcgtggcgtcgggggcccgcgcggcgcagtcccccttcagcatcccgaacagcagcagcggcccgtacggctcgcaggactcggtgcacagcagccctgaggacggcggcggcggccgggaccggccggtgggcgggagccccggcgggccgcgcctggtgatcggctccttaccagctcacctctcgccgcacatgtttggaggatttaagtgccctgtatgctcaaaatttgtatcctcagatgaaatggatttgcatcttgtaatgtgtttaacaaagccacgaataacctataatgaggatgtactgagtaaagatgctggggaatgtgcaatatgccttgaagaattgcagcagggagatactatagcacgactgccttgtctatgcatatatcataaaggctgcatagatgaatggtttgaagtaaatagatcttgccctgagcacccttcagattaagcgtcagcttcctgttttataggttttcttgtcttgacaagatgcttgaaaaaccaagaggatatgaaaatctgtctctggagaaacaaagacgcaggcatactcagccagaaatctgagttttgtgagacttggtaatacagagatggacaatcgtactggggtaaaaaaaccctgctgaagagaggacagtgaccacagaactcagtgtaccaaacatgcatacaaaggacacacagggattttgaaaatgctgcacatcccttaatagtcatctacataggtaatactgataaacattttgtattcagacgccaaagttaactgatttaaaagttgatttactttttattaagttctccagagctgcacaactagttatgttttgatttgttttgttttttaatttggggtctctttgttttccccaacataatgttcataatgtttctgcattcatctgttcttaaattgaaaaacatataatttacttcttataaattgaagtcttaaatgtgaaaccaagaaatgtaatcaagcagtaaaaacatctgaatgtagaccatgatctcaagttcttccattttctcccccacgagtggaaaatagacttctacataggaaagctaaaatatgttaatatttttaaattaaaggtttaatatcagaatgcagtccaaagagcaaatcatattacataattacattttaattaaatatagaatattctactgaattgcaatttattaaatattcttatcctcttaaataaaactgctcaacagttaatcagcagtgaatcatcttgcagctatgcaatttaaaaaaaatacagattaccaatttcaagtgctgccagctaaaataactgttttaacgggtatcttttgtttgttcttttcacttaattattttattgtgctttgcatctccaggcagttctctcacatttgggtaaaatgtttagcaggctgtaaacttaagaaaagggtaaaataaaattttctggagaggaacttggaatttgagggagattttatatacctttaaaaactgtaatttaattgggatgccaggtttatagcaatttgcaactttaattttccagataatctggaggttagcatttgataaatgattttttaaagtagatatgaagattttgttaatttataatttattcatgtgttattactgtaattgaaaatgttatagacacttttaaattcagtttgtgtagaaagaaatgtgttaaacaaaattatgttaataaatattcccacataatacatctgaatggttaaaaatactggaagagttgtcagggctacaatagtgaatgtccttttttttaatatcaaaaatatcgataagtaggttttgtgttttcaacgtagggaaaatgttatcagtgaataggtggtgtactttacttggtataatttaaagttgcacagtaagtactgtttccttattttaatctttctttactcataatgtatttaagaatttgctgttttatttaacgctgctactcttaatcttctctaaatttttccccctactttcttgcttctgtttcacattttttaaaagggcaagtacaggagcaactgctgctacccagaaaaatgtgtgtattataaataattaaagagtttttaattgctttctgtatgaaaaaaaaaaaaaaaaaaaaaaaaaa

SEQ ID NO: 1199 - DNA, 2328 bp, human
cgactcaacagtaaggccccgcgggcgtcctggccgccatgtgcaccgtagtggaccctcgcattgtccggagatacctactcaggcggcagctcgggcagggggcctatggcattgtgtggaaggcagtggaccggaggactggtgaggtcgtggccatcaagaaaatctttgatgcttttagggataagacagatgcccagagaacattccgggaaatcacgctcctccaggagtttggggaccatcccaacatcatcagcctccttgacgtgatccgggcagagaacgacagggacatttacctggtgtttgagtttatgggttgcccccccagccccccacccccgactgcagtgcgcaccctctctgcagacactgacctgaacgcagtcatccggaagggcggcctgctgcaggacgtccacgtgcgctccatcttctaccagctcctgcgggccacccggttcctccactcggggcacgttgtgcaccgggaccagaagccgtccaatgtgctcctggatgccaactgcacagtgaagctgtgtgactttggcctggcccgctccctgggcgacctccctgaggggcctgaggaccaggccgtgacagagtacgtggccacacgctggtaccgagcaccggaggtgctgctctcttcgcaccgatacacccttggggtggacatgtggagtctgggctgtatcctgggggagatgctgcgggggagacccctgttccccggcacgtccaccctccaccagctggagctgatcctggagaccatcccaccgccatctgaggaggacctcctggctctcggctcaggctgccgtgcctctgtgctgcaccagctggggtcccggtgagtgggggcacttcggtgagggtgacagggtggcctatctcaagggagcagggccaccttcctgcaagtttactggggccagtttgtaccagttcagattctgcctgttttcaagatggcagtcccaaacccaacaactgttggccacactgaaagcaggagcccctctggtgctcctagagggtggcccagaggagctgtgccagggcgtggagaggagggcaccagggggccgcaggggtctctccaccctgcaggggcccagactgcctgcaggtcaggcacaggggcatctacctagacaggacagcagggtggaccccagtttggaagctgagcccccagccacgaacatggatctgaggaggggcccttgggtcgggccctggagacgacacacggcagcccacaggccacgacagacgctggatgccctcctaccgccagacacctccccagaggccttggacctccttaggcgactcctggtgttcgccccggacaagcggttaagcgcgacccaggcactgcagcacccctacgtgcagagatgatcctggagtgtggaggcagcagcggcacctcgagagagaagggcccggagggtgtctccccaagccaggcacacctgcacaaacccagagccgaccctcagctgccttctaggacacctgtgcagggtcccagacccaggccccagagcagcccaggccatgaccctgccgagcacgagtccccccgtgcagccaagaacgttcccaggcagaactccgctcccctgctccaaactgctctcctagggaatggggaaaggccccctggggcgaaggaagcgccccccttgacactctcgctggtgaagccaagcgggaggggagctgcgccctccctgacctcccaggctgcggctcaggtggccaaccaggccctgatccggggtgactggaaccggggcggtggggtgagggtggccagcgtacaacaggtccctccccggcttcctccggaggcccggcccggccggaggatgttcagcacctctgccttgcagggtgcccaggggggtgccagggctttgcttggaggctactcccaagcctacgggactgtctgccactcggcactgggccacctgcccctgctggaggggcaccatgtgtgagccgccctactcccttcacctggccctctgttcctgccccagccccttccccagacccctctccagtctcctgcaccccttagccctccctgctttgcctggcccgttgaagttccagggagcttgcccgggtctcctcgggggagcagatgagggccctgcccccgccccactgacttcctccaataaagtcatgtctgcccccaaaaaaaaaaaaaaaaaaaaaaaaaaaaaaaaaaaaaaaaaaaaaaaaaaaaaaaaaaaaaaaaaaaaaaaaaaaaaaaaaaaaaaaaaa

SEQ ID NO: 1200 - DNA, 3838 bp, human
tcttggaagatccgagctgggtttcatctcctttttgattttgagtagttccctccacgagaactgacttccaggtgttcaccaagggaaacaaggtggttctcacactggaaatgaggaaggatgacagtttttgagactgactgttaacggctcagaggtgcccctcattcaaaatgccttttaaagcatttgataccttcaaagaaaaaattctgaaacctgggaaggaaggagtgaagaacgccgtgggagattctttgggaattttacaaagaaaaatcgatgggacaactgaggaagaagataacattgagctgaatgaagaaggaaggccggtgcagacgtccaggccaagccccccactctgcgactgccactgctgcggcctccccaagcgttacatcattgctatcatgagtgggctgggattctgcatttcctttgggatccggtgcaatcttggagttgccattgtggaaatggtcaacaatagcaccgtatatgttgatggaaaaccggaaattcagacagcacagtttaactgggatccagaaacagtgggccttatccatggatcttttttctggggctatattatgacacaaattccaggtggtttcatttcaaacaagtttgctgctaacagggtctttggagctgccatcttcttaacatcgactctgaacatgtttattccctctgcagccagagtgcattacggatgcgtcatgtgtgtcagaattctgcaaggtttagtggagggtgtgacctacccagcctgccatgggatgtggagtaagtgggcaccacctttggagagaagccgactggccacaacctctttttgtggttcctatgcaggggcagtggttgccatgcccctggctggggtgttggtgcagtacattggatggtcctctgtcttttatatttatggcatgtttgggattatttggtacatgttttggctgttgcaggcctatgagtgcccagcagctcatccaacaatatccaatgaggagaagacctatatagagacaagcataggagagggggccaacgtggttagtctaagtaaatttagtaccccatggaaaagatttttcacatctttgccggtttacgcaatcattgtggcaaatttttgcagaagctggaccttttatttgctcctcataagtcagcctgcttattttgaagaggtctttggatttgcaataagtaaggtgggtctcttgtcagcagtcccacacatggttatgacaatcgttgtacctattggaggacaattggctgattatttaagaagcagacaaattttaaccacaactgctgtcagaaaaatcatgaactgtggaggttttggcatggaggcaaccttactcctggtggttggcttttcgcataccaaaggggtggctatctcctttctggtacttgctgtaggatttagtggcttcgctatttcaggttttaatgtcaaccacctggacattgccccacgctatgccagcattctcatggggatctcaaacggagtgggaaccctctctggaatggtctgtcccctcattgtcggtgcaatgaccaggcacaagacccgtgaagaatggcagaatgtgttcctcatagctgccctggtgcattacagtggtgtgatcttctatggggtctttgcttctggggagaaacaggagtgggctgacccagagaatctctctgaggagaaatgtggaatcattgaccaggacgaattagctgaggagatagaactcaaccatgagagttttgcgagtcccaaaaagaagatgtcttatggagccacctcccagaattgtgaagtccagaagaaggaatggaaaggacagagaggagcgacccttgatgaggaagagctgacatcctaccagaatgaagagagaaacttctcaactatatcctaatgtctgagaggcacttctgtcttctccttactttagaaacagaaagtatccatacctattgcctttcttgtagcccagcttgccagaggtccaaatattgggaggggagaagatctaaccagcaacagggaaaagagaaatattatctttcaatgacatgtataggtaaggagctgcgctcagttgataacatagttgataatacatattttttgaattgacagttgacccttctctcaaagagctaaacttattcagaaaggaatgactagaagaaaaaggagacaataccatgttgttcaaagaaacattgaaggaaattgggatgtttggccagaaggaatgtaaacagtagtagtagctgccaccacatctctagggtagccatgcagaggagggcttcatattcccaataaaccccacgttgtggcaggtgctttataaacactcttatttaatctccacacctttatgacacacatttcttatccccattttacaaccaaggcatctaaagcaacaagaaatgaacttgcccaaggtcatctgccagggtcagtgctgagactgttgaagctctcaataggtggcagttttagggaagatttccattcagtgtagggaagacatttgtaataatgaaaactgaaaatggagtaattgtgagtaactcaccactttagcaggtgttggggaagggaaacatttgggttgatgaggcagaggggattcaaatgtgtgagaggctagattcaaagaccctcagtgttctatgttatctgaagagtcaaatggttttgtgactccatagtttttaaagtaataagggtcaaagactacatcagagattcaaataggtttttaaagaaaagctaagcaagagagccaaatttttagaaatctgatggtcaaaatagctgaaagcagtaaacaagagattggctattaaatttcaactttccataatattaagaatgtagctaaatgatgtcccaaactacttacaaacttttaagacatttaataatttaagaagtaggttcatgtgttttcttaggtaaagttcttctgaaagaattttctatttttaaaaaatgtatctctttagccttttctgctggagattatattaggaagtttcatcagattgtataaaattatgattttgtatcaaaagtattcatgatgactctatttggaatgatattcagggaaatcacaataatatagcagtagttatacagagaaatactacaatgaaaacatttggggcaattagacctacagttactgttgaaaaattcacctttgattgcataaggcaattacatggatacttttagatatatttaaaattttaacattggcatctaaagtgttatttgaaaataaaattattttcctgttcattgattttaaacattttattcctactttcagaagaaaaatataatacggaaaaaattatagatttacttgtagcttattattgtaaagtgttttttttttttttctaatttctcccacatgtatttctggtccccagtgatactagctgagttgtagtgtattttataaatggaataatcttggggaaaaattgcgattcttcattaaataatattctttatgtcactagcatacaatttatgttagtagacatctttaaatctctttaatgagtgaatccatgcaagccccataaaacagttcctagcatgcagaaaatgcccacgtaaatagctgtcatcatcattatcttttaacattttgggggactttccagttgaaaagaaaacatgctatgtcatttttatccattatccctggaacttattgtgaaagttgtgctgttttctaagtaaaataaaaaataaaaaattagcaattta

SEQ ID NO: 1201 - DNA, 2279 bp, human
cggaaggacgggagggcacgggagtgcagcccgcccatgtggctactggaggtcacgttccctaactgatcccttggttctctcgggtggagccttcagcgtgcacggcggggtttgactttgccaccgtctctcttctgggttccaataaagttttcctcttcctctcctcgtacggagttcaagatggcggcctcctggtcgctcttggttaccctgcgccccttagcacagagcccgctgagagggagatgtgttgggtgcggggcctgggccgccgctctcgctcctctggccaccgcccctgggaagcccttttggaaagcctatacggttcagacatccgagagcatgaccccaactgccacttcagagacttatttgaaagctttggccgtttgccatggacctctggaccactatgattttctgatcaaagctcatgagctaaaggatgatgaacatcaaagaagagtcatacagtgtttgcagaaattacacgaggaccttaaaggatacaatatagaggcagaaggccttttttcaaagcttttttcaaggagcaaacctccaaggggcctgtatgtttatggagatgttggtacaggaaaaacaatggtgatggacatgttttatgcttatgtggaaatgaagaggaaaaaacgggttcattttcatggtttcatgctagatgtgcacaaaagaatacatcgccttaaacagagtttgccaaaaaggaaaccaggattcatggctaaatcatatgacccaatagctcccatagccgaagaaatcagcgaagaagcatgtctcctatgttttgatgaatttcaggtcactgacattgctgatgccatgattctgaaacagctttttgaaaatctgttcaaaaacggggtcgtcgttgtggcaacatccaacaggccaccggaagatctctataaaaatggactccaaagagctaactttgtaccattcatagcagtcttgaaggaatattgtaatacagtccagctagattctgggatagattaccggaaaagggaacttcctgctgcaggaaaactctactacctcacaagtgaagctgatgtggaggctgtcatggataagttgtttgatgagctggctcagaaacaaaatgatttaactagaccaaggattctaaaagtgcaaggcagagagctgcgcctgaataaagcctgtggaaccgttgccgactgcacatttgaagagctgtgtgagagaccacttggagccagtgactatttggaactatcaaagaattttgatacaatatttttacgaaacattccgcaatttactctggcaaacaggactcaaggtcgaagattcataactctcatcgataacttttatgatctcaaggtgcgtataatttgctctgcgtcgactcctatatcaagcttatttttgcatcaacatcatgacagtgagttggagcaaagcagaatactgatggatgatttggggctgagccaggattcagcagaaggactctccatgtttaccggagaagaggaaatctttgcatttcagcgcacaatttcccgactcacggaaatgcagactgaacagtactggaatgaaggagacagaaccaagaagtaactgccacttttgcataaataaaactctagacaaatggttaacgcaggcagaactccttattgtgggacttgaaggaatcattttctcatcattaattatgcactttgtcctctggaccattttaatctaaaattgctctcaaggatctagtggattagtaagttaaacacttaacattttttaggtctgctttttcttatttggccttatttctgcaccatgaaattaaaatcatctcattcctgaagatgaatgtaggaccagacattttagcttcacattaaaccacctgaatgaaccttgaatgcacaagtaaatgcaagacgtctggataccttcaagctttggctgcatggtggtggcatgttagaaatacatcttttataatgggggaagaatgccctatgtttcaattcaaaacaaagacagttttccaatctgatataaactaaaagggataatattttagaatatgggcttatatgtggttttttttttttggttatgaattacagtaaatctcccaggccttcagatttctacataatggaagaatatgtttttaaccctgagatcaagtttagtaggcaggacttgatctcaagtggtcacaaagttttctaaaaaaaaaaaaaaaaagggcggcc

SEQ ID NO: 1202 - DNA, 2411 bp, human
ctcactcggtcagttcctcgggcgagttacggggacgacctgcgggagcacgcgggcagtggccggacgctgaagcccaggagagcgatggagacgtatgcggaggttggcaaggagggcaagcctccctgtgcatcggtggatctgcagggagacagctccttacaggtggagatttctgacgcagtgagtgagcgggacaaggtgaaattcactgttcaaacaaagagctgcctccctcacttcgcccagaccgagttctcagtcgtgcggcagcacgaggagttcatctggctgcatgatgcctacgtggagaatgaggagtacgccggcctcatcatccccccagcccctccgaggccagactttgaggcttcgagggaaaagctacagaaattgggcgagggggacagctctgtcactcgggaagagtttgccaagatgaagcaggagctggaagcggagtacctggccatctttaagaagacagttgcgatgcacgaagtctttctgcagcgcctggcggcccaccccaccctgcgtcgagaccacaacttctttgtgtttttggaatatggacaggatctgagtgtccgggggaagaacaggaaggagctcctcggagggtttctgaggaatattgtgaagtccgcggatgaagccctcatcacgggcatgtcagggctcaaggaggtggatgacttctttgagcatgagaggaccttcctgttggagtatcacacccgtatccgagatgcctgcctgcgggccgaccgcgtcatgcgcgcccacaagtgtacgcagggcccaaggggtcctggatccccctgcccctctccccagcggttcaactccttgggggagagaagagagcagggcgtgccttgttgtttgtctgtggccacaagcaccaaggcttgacatgcagatgtaggggctctgatgggggctgttccccaacaggcctggcagacgattatatccctatctcagctgcgctgagcagtctgggaacacaggaagtcaaccagctaaggacgtgaggactccccccacccctaccctctccctgtgcctgtaataccatgtcttcccatgaggggtcactctgtagatgtctactgtcagctctaggtgggaggtgtaggctctcctgttgggggatggtgttgggaaggaaaggggagagggagattcccaaggagaggctgagacagagaggctttgagctgttcctcagccccctaccctaactccctccctactgcttcctaggagcttcctcaaattggcagagctctttgaacggctgaggaagctggagggccgggtggcttccgatgaggacctgaagctgtcagacatgctgaggtactacatgcgtgactcacaggcagccaaggacctgctgtaccggcggctgcgggcactggccgactacgagaatgccaacaaggcgctggacaaggcgcgcaccaggaaccgggaggtgcggcccgccgagagccaccagcagctgtgctgccaacgcttcgagcgcctctccgactccgccaagcaagagctcatggacttcaagtcccgccgggtctcctcttttcgaaagaatctcattgagctggcagagctggagctcaaacacgccaaggcagaagagcaccgccttcttgcgcttcttcacctcctctggcgttgaagacttacgcaccttcatgtcgttgaacaccttgatgacaccatcagagacagccacaccggaggcctaggagacatgccacgtatacgtcgagaaaaggattctagggaactgccccttgttttttcagaagatctcagtccacgtcccgagtggtcactagtgcccttcccaaggcaagtcactagttttcccacccaagtcactgtcaaagaaccagatgggacacaacctcagaatggcagccatggcctctgatcacctagttcaacaaccccttccctcattttacaggatagaaatgcaaaactcgtgaaaagcagaaccttgaccaaaatgtgaacccagaattaaaagatccaccggctactgactcatttgctactcacagtacttgctctcagcctttggataaaactggtgatttagaacttcggatatggaggacccaaacacctgagccaagactcctcttcagaaagagccaagaccccacaatgctagatgggaccccaaggacaccgaacagttacaacaaacccaccagaactgcttaatacagttactacacaaacgacccctgttcccagctaggctctttcccaaccaagacaagaattgcaacccccattaaggaccctgcccgacaactcccttcttccgggaatggtgctaggccccagaagtcgctgataaaaattaacatgccaaactc

SEQ ID NO: 1203 - DNA, 2130 bp, human
aggacagggcagcggcggtgacccgagctgccgcccgacatgaactcgctggagcaggcggaagccccgcgagttgtatccctgattcctgcggtggtttccggtaactgccaagatctcaaggcttttgagaggagacttactgaatatattcattgtttgcaacctgctactggacgctggagaatgcttcttatagtggtatctgtctgtacagctactggtgcctggaactggttaatagaccctgagacacaaaaggtgtccttcttcacatcattatggaatcacccatttttcaccattagctgtatcactctaataggcttgttctttgctggaatacacaagagagtagttgcaccatcaattatagctgctcgatgtcgaacggtattagcagaatacaatatgtcttgtgatgatacaggaaaactaattttgaaacctaggcctcatgttcaatgacaatcttcactcattgttatgggacttaaaatagcctttcttcgaataagtgatacagcaaaaagccataaaggattccttttgcggttggatatgtaaaggtcatagcagcaactgacaagaagtgtgcaatatttacctggattatcttgatgatggtgactcattatcagtgctttggtacttttgattacctgtgtttcagtattagtgtcactttagtacttcagatcctgcaaatatttttgcagatgaagtatgtatgtatgttactaagttaaacttagaaacagaacctcattcagtttttataatgtatttttgcaaactactgtaaatagcaaatcaatgccaatgttaaacaaagaggaaaacgttgtgtggactttgttctcttgcaccggtatttcaggaacatctgcttgccatccccacagctctttaaaactggctattatgtgtgcctttcattcttacatttctaatcatactgcaggaaaaacattggattcagcttagactgaggaaaactctccattatgttgtaagaaattatagatgttttgagagacactttttgttaaaccagatattgaactccagcaactattgtggttatatttttagttcattgttctcatttaatgctaaatatcctttatattgctttaataattttcttttttttttttttttttttagacggagtctcgctctgttgccaggctggagggcagtggcacgatcttggctttctgcaacctctgcctcccaggttcaagcgattctcctgcttcagccttccgagtagctgggactacaggcgcatgccaccatgcccagctaatttttttgtatttttagtagagacggggtttcaccacgttggccaggatggtttcgatctcctgacctcgtgatcctcctgcctcatcctcccaaaatgctgggattacaggcataagccaccgtgcctggcctctttaataatttttaaaataccctaaaggcttgtgaatatacaagtctactgataaattatgtattgtctgggaatttgatagtcattgttttagataactggattttacgctgtggtagacaggctgtgacactagtgttgcacaggtgtaattggtcatcctatgccttcaccagaataacttgggagtggtgccagaaactagagtctacaattctcactgtttagagagtgttaatgacatactgtgtatgcataatagccgcatgtactataatagcccttaaaattaaactattgggattgctgtaaatattttaaagtactggaggtgccttttacctgtttattagattttgaaaaggtttaaattatttcatgagcaatcttttaaatttcatttaacataaagctgaaaattcaataacaggataaaaaagctttttaacaaggctgccatttaacttaaatgtgttcatcttagctttcacttgtataaaatttgattctttgaactgcagcaataaaaccctcagctcctaagaagtcttaagagggtattctatatattctgctttgttttattttctgtaaattttgtaggtaaatatgtgcattaaaaataaatactttatatataactcgtgaaaaaaaaaaaaaaaaaaaaaaaaaaaaaaaaa

SEQ ID NO: 1204 - DNA, 1895 bp, human
gtctacagcaaggcctaataggggacctgagggcacagtcctcaggatgtttcggggagaataggagccagaacctgagcccctaagccattcccctcaccaatgatggggtccccagtgagtcatctgctggccggcttctgtgtgtgggtcgtcttgggctgggtagggggctcagtccccaacctgggccctgctgagcaggagcagaaccattacctggcccagctgtttggcctgtacggcgagaatgggacgctgactgcagggggcttggcgcggcttctccacagcctggggctaggccgagttcaggggcttcgcctgggacagcatgggcctctgactggacgggctgcatccccagctgcagacaattccacacacaggccacagaaccctgagctgagtgtggatgtctgggcagggatgcctctgggtccctcagggtggggtgacctggaagagtcaaaggcccctcacctaccccgtgggccagccccctcgggcctggacctccttcacaggcttctgttgctggaccactcattggctgaccacctgaatgaggattgtctgaacggctcccagctgctggtcaattttggcttgagccccgctgctcctctgacccctcgtcagtttgctctgctgtgcccagccctgctttatcagatcgacagccgcgtctgcatcggcgctccggcccctgcacccccaggggatctactatctgccctgcttcagagtgccctggcagtcctgttgctcagcctcccttctcccctatccctgctgctgctgcggctcctgggacctcgtctactacggcccttgctgggcttcctgggggccctggcggtgggcactctttgtggggatgcactgctacatctgctaccgcatgcacaagaagggcggcacgcaggacctggcggactaccagagaaggacctgggcccggggctgtcagtgctcggaggcctcttcctgctctttgtgctggagaacatgctggggcttttgcggcaccgagggctcaggccaagatgctgcaggcgaaaacgaaggaatctcgaaacacgcaacttggatccggagaatggcagtgggatggcccttcagcccctacaggcagctccagagccaggggctcagggccagagggagaagaacagccagcacccaccagctctggcccctcctgggcaccaaggccacagtcatgggcaccagggtggcactgatatcacgtggatggtcctcctgggagatggtctacacaacctcactgatgggctggccataggtgctgccttctctgatggcttctccagcggcctcagtaccaccttagcggtcttctgccatgagctgccccacgaactgggtgactttgccatgctgctccagtcagggctgtcctttcggcggctgctgctgctgagcctcgtgtctggagccctgggattggggggtgcagtcctgggggtggggctcagcctgggccctgtccccctcactccctgggtgtttggggtcactgctggggtcttcctctatgtggcccttgtggacatgctaccagccctgcttcgtcctccggagcccctgcctacgccccatgtgctcctgcaggggctggggctgctgctggggggcggcctcatgcttgccataaccctgctggaggagcggctactgcccgtgaccactgagggctgatggggccagtggaaaggggtcgggttgcccttccttccccccaaccacaggaatggaggcgggacacagggccagtaggagcaataggattttaataaacagaacccatcccaaaaaaaaaaaaaaaaaaaaaaaaaaaaaaaaaaaaaaaaaaaaaaaaaaaaaaaaaa

SEQ ID NO: 1205 - DNA, 2490 bp, human
atgacggatgaacaggtgtgcgagactgtggagaaatacggagccaaccgggaggagtgtgcccgcctcaacgcctccctctcctgcctcaggaatgtccacatgtcaggaggcaacctttccaaacaagactggaccatccagtggcccaccacagagacggggaaggagaacaatcccgtgtgccccccggagcccaccccgtggatccgcacccatctctcccagagccccagggtcccgtccaagtgcgtccagcactattgtcacaccagccccactcccggggcccctgtgtacacccacgtggacaggcttaccgtggacgcctacccgggcttgtgcccgcccccgccactggagtcgggccaccgttccctgcccccatcgccccggcagcggcacgcggtccgcaccccgccgcgcacccccaacatcgtcaccaccgtgaccccgccgggcacgccgcccatgaggaagaagaacaagctgaagcccccggggaccccaccgccctcctcccgaaaactgatacacttgatcccgggattcaccgcgctgcatcggagcaaatcccacgagttccagctggggcaccgcgtggacgaggcccacacgcccaaagccaagaagaagagcaaacccttgaacctcaagatccacagcagcgtaggcagctgcgagaacatcccctctcagcagcgctccccgctgctgtccgagcgctccctccgctccttctttgtgggacacgcacctttcctgccttccacccctcctgttcacactgaggccaacttctctgcaaacacactgtcagtgccacgctggtccccgcagatccctcgcagagatctcggcaactccatcaagcacaggttttccaccaagtactggatgtctcagacgtgcacagtctgtgggaaagggatgctttttggcctcaagtgtaaaaactgcaagttaaagtgccacaacaaatgcaccaaagaagccccaccctgtcatcttctgatcatccaccgaggagatccagcaaggttagtccggacagagtccgttccgtgtgacatcaacaaccctctacggaagccacctcgctattcagacctgcacatcagtcagacgctccccaaaaccaacaaaatcaacaaggaccacatccctgtcccttaccagccagactccagcagcaacccctcctccacgacgtcctccacgccctcctcgccagcaccccccctccctcctagtgccacgccgccttctcccctacacccttccccacagtgcacacggcagcagaagaacttcaacctgccagcatcccactactacaaatacaagcagcagttcatcttcccagatgtggtgccggtgccggagacgccgacccgggcgccccaggtcatcctgcatccggtgacctcgaatccaatcttggaaggaaatccattacttcaaattgaagtggagccaacgtcggagaatgaagaggtccatgatgaggccgaagagtcagaggatgacttcgaggagatgaacctgtccctcctctcggcccggagcttcccacgcaaggccagccagaccagcatcttccttcaggagtgggacatcccctttgagcagctggagatcggcgagctcattggaaagggccgctttgggcaagtgtaccacggccgctggcatggcgaggtggccatccggctgattgacattgagagggacaacgaggaccagctcaaggccttcaagcgggaggtgatggcctacaggcagacacggcatgagaacgtggtgcttttcatgggtgcctgcatgagcccgcctcacctggccatcatcaccagcctctgtaagggacggacgctctattccgttgtgagggatgccaaaatcgttttggatgtcaacaaaaccaggcagattgctcaagaaattgtgaagggcatgggctacctccacgccaagggaatcctacacaaggacctcaagtcaaagaacgtcttctatgacaacggcaaagtggtcatcacggactttggactcttcagcatttctggggtgctgcaggctggcaggcgggaggacaaactgcgcatccagaatggctggctatgccacctggcaccagagatcatccgccagctgtcccccgacacagaggaggataagctccccttctccaagcactctgacgtctttgcccttggcacaatctggtatgaactccacgccagggaatggcctttcaagacccaaccagcagaggcaataatctggcaaatgggcacaggcatgaaacccaacctcagccagattggcatgggaaaagaaatctcggacattcttctcttctgctgggcctttgaacaagaagagagacctaccttcaccaagctcatggacatgctggagaaactgccaaagcgaaaccgtcgcctgtctcaccctggacatttctggaagtctgcagagctgtga

SEQ ID NO: 1206 - DNA, 2383 bp, human
agaggcgtacaggcccttcccgaccgtagcgagggtgctgctgcgctgggggaaggaaaacgccgctttgactgtgccttgttctcacagctggcgggaagcaagcgccttttcgaaagccagaggctcgagttacccctcttaccaccgtcatggcagtcccaggttgcaacaaggacagtgtcagagcaggctgtaaaaaatgtggctaccctggtcacctgacttttgaatgccgcaattttctccgagtagaccctaaaagggacatagttttggatgtcagcagtacaagtagtgaagatagcgatgaagagaatgaagaactgaataaattgcaggcattacaggaaaaaagaataaatgaagaagaggaaaagaagaaagaaaaaagcaaagaaaaaatcaaattgaaaaaaaaaaggaaaaggtcttactcatccagttccactgaagaggacacttcaaaacaaaagaaacaaaaatatcagaagaaagaaaagaaaaaagaaaaaaagagtaaatcaaaaaaagggaaacatcacaaaaaggaaaaaaagaagagaaaaaaggaaaagcattcttctacacctaatagttctgaattctccagaaagtaactgagactttggcttaagccgttaaatttaaaaatttgtttttaaaacgtgtttgcccttccttggaatttgctatatattatgctttgcaataaatcacagccttttccatatagacatttttcgtatttgggaccattatccctctggcaatatatttttaatgtgctgtaactgtaaagtattaaatcagtcttgttacttgatagccatgccccaagtatagctatttgtgtatactaaacacatcatttttggtatttgtgtctctgtgtgtttggctagtgttactacttcataagttcattgtaaaatggctttactgccatcaacatgggtcatctacctagcagttaatgagtattgctggatcaggtgtccaccttccaatgatgaagcaaggtaaggggtaatgttttgctcttgacacagagaaatttaatagctttatgtactaaaatataatatcttttaaagatagtgaaattcttcagttttttaaatctctagggattttttttcaatgttgtagaagatgcagctgcttaatggtcttgactaggactttttaaatgaatggtgtctgcaggtagatgatcatgaaaatatctctaacaaagttttactcttctatgaaatgcagaatttctagtacctgcctcctttgtttttgtaataattaaaatacttcttgtataaagagattagttcagcctgttagtaagtctgcagagatgatgctgagttggttgtgatttttagaatagactcctgggttgttttacaaatgtgccatattggcatgtcttacagtgatacctcaaacacagaaatttttatttaggaagatagctaaatctttattagaactgatttttattgtattcagtataaattttatgaagcttgtttctatgagtactgtggaaaattttataaatgtgagcatatatatttattttgtctgacataatttgtagttttaaagcaagtttcacactgaacttaacgttttcataaatgaccagtttgggatgtttctctcttttactttagtggcaaactcaagagtaaaaagtgtcaaaaaaagaattgagaattttattctgtactttttaaaatttaagagccagggagttgcatcatgaaagcctttgtataataatggaaattttatatgggtaagcattttcaaacacatattagtagatacgttttttaaatttctattttcacattgatcagtgttactttgcttaatacttaggtagcccttatgtccactaaagtaaatgcttatgttgtagaagcatcgaacatcaaccaatgtcatggcacagcaccaaagattgcaaatacctcactatggtgcgcttagaaattttcaaattgataacctatagatacggctgcaggtgaattcatgatagtgaaatcagctaagtatacttaacctcacaggctagaaaggtttactgattcttgtttcacctggcacccaatgtggataccctcagtaagactcagggagccttataactcctcttaacatatgcttacccatgcttaaattctagggaagctgtatccacagccctctgcattgcagccatgagagctctcacgctttcaacccttccataacctaatttagtcatttgggcctctcaaaaggaaatgcttttgtttaaataggtcttactcatccagttccactgaagaggacacttcaaaacaaaagaaacaaaaatatctgaagaaag

SEQ ID NO: 1207 - DNA, 1258 bp, human
ccacgcgtccggcccgctctcacttttcagcggcaggcgaagggggctgaggaaaggaggtgggtctaggcaggggaaattggggtgccaccagacggagacagcttggactaccagaatcaagcactcttttggaagagggtaatctctctccaaaaactgaggacacttaccttccccatatattgagtccagctgtgtttggtggcccaggtactaatttcaagatgccaggacgttccagttcaaattcaggttcaactggtttcatctccttcagtggtgtagagtctgctctctcctccttgaaaaacttccaagcctgtatcaactctggtatggacacagcttctagtgttgctttggatcttgtggaaagtcagactgaagtgagtagtgaatatagtatggacaaggcaatggttgaatttgctacattggatcggcaactaaaccattatgtaaaggctgttcaatctacaataaatcatgtgaaagaagaacgtccagaaaaaataccagatttaaaattattggtagagaagaaatttttggctttacagagcaagaattctgatgcagactttcaaaataatgaaaaatttgtacagtttaaacaacagctgaaagaactaaagaagcaatgtggtcttcaagctgacagagaagctgacggaacagaaggagtggatgaagatataattgtgacccaaagtcagaccaacttcacctgccccattacaaaggaggaaatgaagaagccagtgaaaaataaagtgtgtggccacacctatgaagaggacgccattgttcgcatgattgagtccaggcaaaagcggaagaaaaaggcctattgccctcaaattggctgtagccacacggatataagaaagtcagatcttatccaggatgaagcacttagaagggcaattgagaaccataacaagaaaagacatcgtcattccgagtaggaaaagccacctgcctgcagggacaccagcagcctacctcctaccccagctgtctgttgagagcagtgctgaccccagcagttagggactggctgcatagcatacttgttgggggtaaaacttgttgcttttatgtgtgcttgaaaacatttttcaaagttacacaacagaaatgcaatcatattgtttatttttaagtgttctataatgttaaataaaactttgatcatctgcaaaaaaaaaaaaaaaaaaaaaaaaaaaaaaaaaaaaaaaaaaaaaaaaaaaaa

SEQ ID NO: 1208 - DNA, 2057 bp, human
gcgcggcacttccgctggccgctggctcgctggccgctcctggaggcggcggcgggagcgcagggggcgcgcggcccggggactcgcattccccggttccccctccaccccacgcggcctggaccatggacgccagatggtgggcagtggtggtgctggctgcgttcccctccctaggggcaggtggggagactcccgaagcccctccggagtcatggacccagctatggttcttccgatttgtggtgaatgctgctggctatgccagctttatggtacctggctacctcctggtgcagtacttcaggcggaagaactacctggagaccggtaggggcctctgctttcccctggtgaaagcttgtgtgtttggcaatgagcccaaggcctctgatgaggttcccctggcgccccgaacagaggcggcagagaccaccccgatgtggcaggccctgaaactgctcttctgtgccacagggctccaggtgtcttatctgacttggggtgtgctgcaggaaagagtgatgacccgcagctatggggccacagccacatcaccgggtgagcgctttacggactcgcagttcctggtgctaatgaaccgagtgctggcactgattgtggctggcctctcctgtgttctctgcaagcagccccggcatggggcacccatgtaccggtactcctttgccagcctgtccaatgtgcttagcagctggtgccaatacgaagctcttaagttcgtcagcttccccacccaggtgctggccaaggcctctaaggtgatccctgtcatgctgatgggaaagcttgtgtctcggcgcagctacgaacactgggagtacctgacagccaccctcatctccattggggtcagcatgtttctgctatccagcggaccagagccccgcagctccccagccaccacactctcaggcctcatcttactggcaggttatattgcttttgacagcttcacctcaaactggcaggatgccctgtttgcctataagatgtcatcggtgcagatgatgtttggggtcaatttcttctcctgcctcttcacagtgggctcactgctagaacagggggccctactggagggaacccgcttcatggggcgacacagtgagtttgctgcccatgccctgctactctccatctgctccgcatgtggccagctcttcatcttttacaccattgggcagtttggggctgccgtcttcaccatcatcatgaccctccgccaggcctttgccatccttctttcctgccttctctatggccacactgtcactgtggtgggagggctgggggtggctgtggtctttgctgccctcctgctcagagtctacgcgcggggccgtctaaagcaacggggaaagaaggctgtgcctgttgagtctcctgtgcagaaggtttgagggtggaaagggcctgaggggtgaagtgaaataggaccctcccaccatccccttctgctgtaacctctgagggagctggctgaaagggcaaaatgcaggtgttttctcagtatcacagaccagctctgcagcaggggattggggagcccaggaggcagccttcccttttgccttaagtcacccatcttccagtaagcagtttattctgagccccgggggtagacagtcctcagtgaggggttttggggagtttggggtcaagagagcataggtaggttccacagttactcttcccacaagttcccttaagtcttgccctagctgtgctctgccaccttccagactcactcccctctgcaaatacctgcatttcttaccctggtgagaaaagcacaagcggtgtaggctccaatgctgctttcccaggagggtgaagatggtgctgtgctgaggaaaggggatgcagagccctgcccagcaccaccacctcctatgctcctggatccctaggctctgttccatgagcctgttgcaggttttggtactttagaaatgtaactttttgctcttataattttattttattaaattaaattactgcaaaaaaaaaaaaaaaaaaaaaaaaaaaaaaaa
